(19) United States
(12) Patent Application Publication
(10) Pub. No.: US 2020/0239550 A1
(43) Pub. Date: Jul. 30, 2020

(54) ANTI-RESPIRATORY SYNCYTIAL VIRUS ANTIBODIES, METHODS OF THEIR GENERATION AND USE

(71) Applicant: Adimab, LLC, Lebanon, NH (US)

(72) Inventor: Laura M. Walker, Lebanon, NH (US)

(21) Appl. No.: 16/754,848

(22) PCT Filed: Oct. 12, 2018
(86) PCT No.: PCT/US18/55750

§ 371 Date: Apr. 9, 2020

Related U.S. Application Data
(60) Provisional application No. 62/572,400, filed on Oct. 13, 2017.

(51) Int. Cl. C07K 16/10

(52) U.S. Cl. CPC C07K 16/1027; C07K 2317/21; C07K 2317/92; C07K 2317/76; C07K 2317/565

(57) ABSTRACT

Provided are antibodies or antigen binding polypeptides characterized by the ability to neutralize respiratory syncytial virus (RSV). Specifically, the antibodies or antigen binding polypeptides are characterized by high affinity binding to RSV fusion glycoprotein (RSVF). Further provided are methods for their identification, isolation, generation, preparation, and use, as well as the heavy chain and light chain sequences of the antibodies provided.

### CROSS REFERENCE TO RELATED APPLICATIONS

[0001] This application claims priority to U.S. Provisional Application No. 62/572,400 filed Oct. 13, 2017, the content of which is herein incorporated by reference in its entirety.

### SEQUENCE LISTING

[0002] This application contains a Sequence Listing filed herewith in ASCII format named 2009186_0226_SL.txt, created on Oct. 11, 2018 and 2,235,807 bytes in size. The Sequence Listing is incorporated by reference herein.

### FIELD OF THE INVENTION

[0003] The invention is related to human antibodies and antigen-binding fragments thereof that specifically bind to Respiratory Syncytial Virus fusion glycoprotein (RSV F) (“anti-RSV F antibodies”), in particular infant anti-RSV F antibodies, compositions comprising these antibodies, and methods for the preparation and use of these antibodies.

### BACKGROUND OF THE INVENTION

[0004] Respiratory syncytial virus (RSV) is a ubiquitous pathogen that causes bronchiolitis and pneumonia in infants and the elderly and substantial morbidity and mortality in infants, the elderly, and immunocompromised individuals. Recent estimates indicate that RSV causes nearly 60,000 deaths annually in children under the age of five (Shi et al., 2017). Currently, the only preventive measure available for RSV is passive prophylaxis with the monoclonal antibody Synagis® (Group, 1998). Unfortunately, prophylaxis with Synagis® is costly, requires multiple doses per RSV season, and is only modestly efficacious (Group, 1998; Homaira et al., 2014; Kamal-Bahl et al., 2002). These factors restrict its use to high-risk infants and limit its availability in developing countries where the greatest burden of RSV-associated mortality exists. Therefore, the development of an effective RSV vaccine and next-generation monoclonal antibodies is of great importance and ongoing clinical trials are evaluating numerous candidates (Griffin et al., 2017; PATH, 2017; Reichert, 2016; Zhu et al., 2017).

[0005] The development of an RSV vaccine has proven to be particularly challenging, due in part to the young age at which primary infection occurs (Glezen et al., 1986), a history of vaccine-enhanced disease in infants (Chin et al., 1969; Fulginiti et al., 1969; Kapikian et al., 1969; Kim et al., 1969), and a lack of long-lived immunity in response to natural infection, resulting in frequent reinfections (Hall et al., 1991; Henderson et al., 1979). Although there are no clinically approved RSV vaccines, there are 43 vaccine candidates in development, of which 19 are in clinical stage development (Center for Vaccine Innovation and Access, PATH available on the world wide web at path.org/programs/center-for-vaccine-innovation-and-access/). Most of these vaccines seek to induce neutralizing antibodies that recognize the RSV fusion (F) glycoprotein, which is targeted by the prophylactic antibody palivizumab and the majority of RSV-specific neutralizing antibodies in human sera.

[0006] The goal of most vaccination efforts against RSV is not to prevent infection, but to reduce the risk of RSV-related complications in high-risk populations, such as infants and the elderly. Five target age groups for vaccination have been proposed—infants under six months of age, infants over six months of age, school-aged children, pregnant women, and adults over 65 years old—with the goal of either directly or indirectly protecting at-risk populations (Anderson et al., 2013). These target age groups have different immunological characteristics that may require different vaccination strategies for optimal protection. Although multiple modalities for an RSV vaccine are currently being pursued, most vaccination strategies share a common goal: to elicit neutralizing antibodies that recognize the RSV fusion glycoprotein (RSV F), which is targeted by the majority of RSV-neutralizing activity in human sera (Magro et al., 2012; Sastre et al., 2005).

[0007] RSV F is a class I fusion protein that mediates viral entry into host cells by converting from a metastable prefusion conformation (preF) to a highly stable postfusion (postF) conformation. On the surface of the virus, RSV F exists in a metastable trimeric prefusion conformation (preF) before undergoing a dramatic structural rearrangement that results in the insertion of a hydrophobic fusion peptide into the host-cell membrane. This intermediate state of RSV F tethers the viral and host-cell membranes before collapsing to form the stable six-helix bundle that is characteristic of the postfusion conformation (postF). Fusion of the viral and host-cell membranes is driven by these conformational changes, and the antigenic topology of RSV F is substantially altered during this transition. Over the past several years, epitope mapping studies using both human and murine monoclonal antibodies have defined at least 6 major antigenic sites on the RSV F protein. Some groups of epitopes, referred to as antigenic sites, are generally conserved on both the preF and postF, whereas others antigenic sites are preferentially or exclusively expressed on only one conformation (Graham, 2017; McLellan et al., 2013; McLellan et al., 2011; Swanson et al., 2011). Molecules that prevent these structural changes can prevent viral fusion and have potential as therapeutics for RSV (Battles et al., 2016; Huang et al., 2010; Lambert et al., 1996; McLellan et al., 2013). Recent studies have shown that the vast majority of highly potent neutralizing antibodies target epitopes that are exclusively expressed on preF. Hence, vaccines that specifically induce preF-specific antibodies may have great clinical potential.

[0008] The first characterized RSV F-reactive antibodies bound to structural elements shared by both preF and postF and were F-conformation-independent. These include Synagis®, which recognizes a helix-turn-helix motif called antigenic site II (Beeler and van Wyke Coelingh, 1989; McLellan et al., 2010b), and 101F, which recognizes the β-strand-rich antigenic site IV (McLellan et al., 2010a; Wu et al., 2007). Antibodies that preferentially bind to postF at antigenic site I were also among the first to be isolated, but were only weakly neutralizing (Anderson et al., 1986; Garcia-Barreno et al., 1989). The first preF-specific antibodies to be described recognized antigenic site Ø, present at the apex of the preF trimer, and were shown to be extremely potent (McLellan et al., 2013). A second class of potently neutralizing antibodies, epitomized by MPEG, was later described and shown to recognize antigenic site III (Corti et al., 2013). Although the secondary structure elements that form site III are present on both preF and postF, they adopt a different spatial arrangement in postF that dramatically decreases the affinity of site III-directed antibodies for this conformation and results in preferential binding to preF (Corti et al., 2013; Rossey et al., 2017; Wen et al., 2017). Antigenic site V, located between sites Ø and III, was recently identified and shown to be the target of additional preF-specific antibodies that are also potently neutralizing (Gilman et al., 2016; Mousa et al., 2017). The isolation and characterization of preF-specific antibodies spurred the development of second-generation prophylactics, such as MEDI8897, which recognizes site Ø (Griffin et al., 2017; Zhu et al., 2017) and is currently in late-phase clinical trials as a potential replacement for Synagis®.

[0009] An effective RSV vaccine will likely require the elicitation of potent neutralizing antibodies and balanced cellular responses (Kristjansson et al., 2005; Lambert et al., 2014; Legg et al., 2003; Saravia et al., 2015; Zhang et al., 2017). Infants present a number of unique challenges for vaccine development, including suppression of B cell responses by maternally derived antibody (Gans et al., 2001; Sande et al., 2014; Trang et al., 2014; Troisi et al., 1997; Wang et al., 2017) and immunological immaturity that results in reduced levels of T cell help, antibody class-switching, and somatic hypermutation (SHM) (Siegrist and Aspinall, 2009). Studies of convalescent infant sera have demonstrated that infants generally produce low titers of RSV-neutralizing antibodies after natural infection (Esposito et al., 2016; Murphy et al., 1986; Sande et al., 2014) but that these titers are higher when levels of maternal antibody are low (Shinoff et al., 2008), suggesting that infants are capable of mounting neutralizing antibody responses to RSV under certain circumstances. Serum studies have also suggested that different epitopes may be targeted as children age into adulthood (Fuentes et al., 2016), but little is known about how these changes are associated with antibody sequence or neutralization potency. In addition, sequencing studies have demonstrated that the antibody variable genes cloned from RSV-specific B cells in infants under three months of age contain little to no SHM, but the corresponding antibodies were not produced and characterized (Williams et al., 2009).

[0010] RSV replicates exclusively in respiratory epithelial cells, initiating infection in the upper respiratory tract and in some cases progressing to the lower respiratory tract. Therefore, an effective RSV vaccine may induce systemic and mucosal immune responses that protect both the upper and lower respiratory tracts (Varga, Current Opinion in Virology, 2014). A substantial body of literature suggests that RSV-specific mucosal antibody levels correlate more strongly with protection against RSV infection than serum antibody titers (Mills J T J Immnology 1971; Singleton R et al, JVI, 2003; walsh E E et al, JID, 2004; Habibi, AJRCCM 2015; Bagga J I D, 2015; Vissers, C V I 2016; Watt P J Vaccine 1990). For example, experimental RSV challenge studies in adult donors have shown that nasal antibody strongly predicts protection from RSV infection (Habibi, AJRCCM 2015). In addition, a recent study in a clinical pediatric cohort showed that high levels of RSV-specific mucosal IgG correlated with reduced viral load and inflammation, whereas plasma IgG levels were not predictive of either (Vissers, C V I 2016). Finally, preclinical immunogenicity and efficacy studies utilizing a live-attenuated vaccine candidate, RGAM2-2, showed that the protective efficacy of this vaccine was significantly higher when delivered by the intrasanal route compared to the intramuscular route, despite both vaccines inducing comparable serum antibody titers. These studies provide compelling evidence that mucosal immunity may be required for efficient protection against RSV. However, relatively little is known about the anatomic location(s) of RSV-specific memory B cells within mucosa-associated lymphoid tissues, the specificities and functional properties of these antibodies, and if/how the RSV-specific mucosal antibody response differs from the systemic antibody response. A better understanding of these aspects of RSV infection and immune responses may provide useful information for the development of effective RSV vaccines.

### SUMMARY OF THE INVENTION

[0011] An improved understanding of the specificities and functional activities of antibodies induced by natural RSV infection in young infants could facilitate the design of vaccine antigens that are less susceptible to interference by maternal antibodies and that focus the response on epitopes associated with neutralizing activity. RSV is a leading cause of infant mortality, and there are currently no licensed vaccines to protect this vulnerable population. A comprehensive understanding of infant antibody responses to natural RSV infection will facilitate vaccine development.

[0012] Applicant has discovered, isolated, and characterized an extensive panel of RSV F-specific monoclonal antibodies from several RSV-infected infants, some of which antibodies recognize antigenic sites distinct from those sites that dominate adult responses. In particular, over 450 RSV F-specific antibodies from the peripheral B cells of seven RSV-infected infants were isolated and characterized and, additionally, over 800 RSV F-specific antibodies from paired peripheral blood and adenoid tissues of 6 young children were isolated and characterized.

[0013] Binding and functional studies of the isolated anti-RSV F infant antibodies generally demonstrate binding to 2 primary antigenic sites and different neutralization potentials, i.e., non-neutralizing antibodies that bind to site I on postfusion F and neutralizing antibodies that bind to site III or site V on postfusion F. Structural studies provide a molecular basis for the conserved features of antibodies recognizing these sites. A subset of antibodies targeting one of the sites displayed potent neutralizing activity despite lacking somatic mutations, suggesting such antibodies can be induced in young infants with suitably designed vaccine antigens. Accordingly, Applicant provides fundamental insights into infant antibody responses in different immune compartments (e.g., mucosal and systemic) and, thus, provides a blueprint for the rational design of infant vaccine immunogens that selectively elicit desired B cell responses in infants.

[0014] In some embodiments, the present disclosure provides isolated antibodies or antigen-binding polypeptides comprising a VH CDR3 having an amino acid sequence according to an antibody number in Table 9B.

[0015] In some embodiments, the present disclosure provides isolated antibodies or antigen-binding polypeptides comprising a VH CDR3 having an amino acid sequence according to an ADI listed in Table 8.

[0016] In some embodiments, the present disclosure provides isolated antibodies or antigen binding polypeptides characterized by ability to neutralize respiratory syncytial virus (RSV).

[0017] In some embodiments, antibodies or antigen binding polypeptides are characterized by high affinity binding to RSV F.

[0018] In some embodiments, antibodies or antigen binding polypeptides are characterized by high affinity binding to RSV prefusion F (preF).

[0019] In some embodiments, isolated antibodies have an amino acid sequence according to:

[0020] (i) Antibody Number 2, 71, 112, 217, 227, 228, 249, 466, 467, 469, 470, 832, 471, 516, 527, 532, 543, 544, 551, 554, 571, 578, 581, 592, 615, 641, 843, 868, or 870;

[0021] (ii) an Antibody Number of (i) with no more than 3 amino acid substitutions, additions, or deletions;

[0022] (iii) an Antibody Number of (i) with no more than 3, 2, or 1 amino acid substitution(s), addition(s), or deletion(s) in a CDR; or

[0023] (iv) an Antibody Number of (i) with no more than 3, 2, or 1 amino acid substitution(s), addition(s), or deletion(s) in CDRH3.

[0024] In some embodiments, antibodies or antigen-binding polypeptides have an IC50 of less than 300 pM, less than 200 pM, or less than 100 pM for neutralization of RSV.

[0025] In some embodiments, antibodies or antigen-binding polypeptides are characterized by binding affinity to pre-F with a kD of less than 10 nM.

[0026] In some embodiments, antibodies or antigen-binding polypeptides characterized by a binding affinity to pre-F that is at least 10, 100, or 1000 fold greater than binding affinity to post-F.

[0027] In some embodiments, antibodies or antigen-binding polypeptides are characterized by high affinity binding to RSV F site III.

[0028] In some embodiments, the present disclosure provides an antibody or antigen-binding fragment thereof that cross-competes for binding or specifically binds to the same epitope(s) of a Respiratory Syncytial Virus (RSV) fusion glycoprotein (F) (“an anti-RSV F antibody”) as an antibody or antigen-binding fragment thereof comprising a CDRH3 amino acid sequence that is at least 80%, 85%, 90%, 95%, 96%, 97%, 98%, or 99% identical to a CDRH3 amino acid sequence of an antibody selected from Antibody Number 1 through Antibody Number 947 as disclosed in Table 5.

[0029] The present disclosure also provides an antibody or antigen-binding fragment thereof that cross-competes for binding or specifically binds to the same epitope(s) of a Respiratory Syncytial Virus (RSV) fusion glycoprotein (F) (“an anti-RSV F antibody”) as an antibody or antigen-binding fragment thereof comprising a CDRH2 amino acid sequence that is at least 80%, 85%, 90%, 95%, 96%, 97%, 98%, or 99% identical to a CDRH2 amino acid sequence of an antibody selected from Antibody Number 1 through Antibody Number 947 as disclosed in Table 5.

[0030] The present disclosure further provides an antibody or antigen-binding fragment thereof that cross-competes for binding or specifically binds to the same epitope(s) of a Respiratory Syncytial Virus (RSV) fusion glycoprotein (F) (“an anti-RSV F antibody”) as an antibody or antigen-binding fragment thereof comprising a CDRH1 amino acid sequence that is at least 80%, 85%, 90%, 95%, 96%, 97%, 98%, or 99% identical to a CDRH1 amino acid sequence of an antibody selected from Antibody Number 1 through Antibody Number 947 as disclosed in Table 5.

[0031] The present disclosure also provides an antibody or antigen-binding fragment thereof that cross-competes for binding or specifically binds to the same epitope(s) of a Respiratory Syncytial Virus (RSV) fusion glycoprotein (F) (“an anti-RSV F antibody”) as an antibody or antigen-binding fragment thereof comprising a CDRL3 amino acid sequence that is at least 80%, 85%, 90%, 95%, 96%, 97%, 98%, or 99% identical to a CDRL3 amino acid sequence of an antibody selected from Antibody Number 1 through Antibody Number 947 as disclosed in Table 5.

[0032] The present disclosure further provides an antibody or antigen-binding fragment thereof that cross-competes for binding or specifically binds to the same epitope(s) of a Respiratory Syncytial Virus (RSV) fusion glycoprotein (F) (“an anti-RSV F antibody”) as an antibody or antigen-binding fragment thereof comprising a CDRL2 amino acid sequence that is at least 80%, 85%, 90%, 95%, 96%, 97%, 98%, or 99% identical to a CDRL2 amino acid sequence of an antibody selected from Antibody Number 1 through Antibody Number 947 as disclosed in Table 5.

[0033] The present disclosure also provides an antibody or antigen-binding fragment thereof that cross-competes for binding or specifically binds to the same epitope(s) of a Respiratory Syncytial Virus (RSV) fusion glycoprotein (F) (“an anti-RSV F antibody”) as an antibody or antigen-binding fragment thereof comprising a CDRL1 amino acid sequence that is at least 80%, 85%, 90%, 95%, 96%, 97%, 98%, or 99% identical to a CDRL1 amino acid sequence of an antibody selected from Antibody Number 1 through Antibody Number 947 as disclosed in Table 5.

[0034] In some embodiments, the anti-RSV F antibody comprises (i) the CDRH3 amino acid sequence of an antibody selected from Antibody Number 1 through Antibody Number 947 as disclosed in Table 5; (ii) the CDRH2 amino acid sequence of an antibody selected from Antibody Number 1 through Antibody Number 947 as disclosed in Table 5; (iii) the CDRH1 amino acid sequence of an antibody selected from Antibody Number 1 through Antibody Number 947 as disclosed in Table 5; (iv) the CDRL3 amino acid sequence of an antibody selected from Antibody Number 1 through Antibody Number 947 as disclosed in Table 5; (v) the CDRL2 amino acid sequence of an antibody selected from Antibody Number 1 through Antibody Number 947 as disclosed in Table 5; (vi) the CDRL1 amino acid sequence of an antibody selected from Antibody Number 1 through Antibody Number 947 as disclosed in Table 5; or (vii) any combination of two or more of (i), (ii), (iii), (iv), (v), and (vi).

[0035] In other embodiments, the antibody or antigen-binding fragment thereof that cross-competes for binding or specifically binds to the same epitope(s) of a Respiratory Syncytial Virus (RSV) fusion glycoprotein (F) (“an anti-RSV F antibody”) as an antibody or antigen-binding fragment thereof comprising (i) a heavy chain variable region (V_{H}) that is at least 80%, 85%, 90%, 95%, 96%, 97%, 98%, or 99% identical to a V_{H} amino acid sequence of an antibody selected from Antibody Number 1 through Antibody Number 947 as disclosed in Table 5, and/or (ii) a light chain variable region (V_{L}) that is at least 80%, 85%, 90%, 95%, 96%, 97%, 98%, or 99% identical to a V_{L} amino acid sequence of an antibody selected from Antibody Number 1 through Antibody Number 947 as disclosed in Table 5.

[0036] In yet other embodiments, the anti-RSV F antibody comprises (i) the V_{H} amino acid sequence of an antibody selected from Antibody Number 1 through Antibody Number 947 as disclosed in Table 5; and/or (ii) the V_{L} amino acid sequence of an antibody selected from Antibody Number 1 through Antibody Number 947 as disclosed in Table 5.

[0037] In certain embodiments, the anti-RSV F antibody is selected from the group consisting of Antibody Number 1 through Antibody Number 947 as disclosed in Table 5.

[0038] In some embodiments, the anti-RSV F antibody binds to an epitope comprising site 0, site I, site II, site III, site IV, or site V of RSV F. In one embodiment, the anti-RSV F antibody binds to an epitope on prefusion F (preF), preferably antigenic site III. In other embodiments, the anti-RSV F antibody binds to an epitope on postfusion F (post F), preferably antigenic site I.

[0039] In some embodiments, the anti-RSV F antibody binds to prefusion F (preF) with high affinity but does not bind to or binds with low affinity to postfusion F (postF).

[0040] In some embodiments, the anti-RSV F antibody does not compete with D25 for binding to RSV F. In some embodiments, the anti-RSV F antibody competes with MPE8 and/or motavizumab for binding to RSV F.

[0041] In some embodiments, the anti-RSV F antibody is a neutralizing antibody. In a certain embodiment, the anti-RSV F antibody has a neutralizing activity (IC₅₀) of less than 100 μg/ml, 50 μg/ml, 25 μg/ml, 10 μg/ml, 5 μg/ml, 1 μg/ml, 0.5 μg/ml, 0.1 μg/ml, or 0.05 μg/ml.

[0042] In some embodiments, the anti-RSV F antibody binds to RSV prefusion F with a K_{D} value of less than 50 nM, 25 nM, 10 nM, 5 nM, 1 nM, 0.5 nM, or 0.1 nM as measured by surface plasmon resonance.

[0043] In some embodiments, the anti-RSV F antibody binds to RSV prefusion F through one or both of the following interactions: a) Tyr33 in CDRL1 and Tyr93 in CDRL3 both contact the α6-α7 loop of RSV prefusion F; and b) five consecutive serine residues, preferably followed by a tyrosine residue (Tyr56), in CDRH2 form a network of hydrogen bonds with Asp310 on (36 of RSV prefusion F.

[0044] In some embodiments, the anti-RSV F antibody has a clean or low polyreactivity profile.

[0045] In some embodiments, the anti-RSV F antibody is a full-length IgG1 monoclonal antibody.

[0046] In some embodiments, the anti-RSV F antibody is a human antibody.

[0047] In some embodiments, the anti-RSV F antibody comprises a Fc region that has been modified to alter effector function, half-life, proteolysis, and/or glycosylation.

[0048] In some embodiments, the anti-RSV F antibody is derivatized.

[0049] The present disclosure further encompasses a nucleic acid sequence or nucleic acid sequences encoding the anti-RSV F antibodies described herein; expression vectors comprising the isolated nucleic acid sequence(s); and host cell(s) comprising the isolated nucleic acid sequence(s) or the expression vector(s). In some embodiments, the host cell is a mammalian cell, a bacterial cell, a fungal cell, a yeast cell, or an insect cell.

[0050] Additionally, the present disclosure encompasses a method for producing an isolated human antibody or antigen-binding fragment thereof that specifically binds to Respiratory Syncytial Virus (RSV) fusion glycoprotein (F) (“an anti-RSV F antibody”) comprising expressing the nucleic acid sequence(s) described herein or culturing the host cell(s) described herein (e.g., a yeast cell or a mammalian cell) under conditions that provide for expression of the anti-RSV F antibody and optionally recovering the anti-RSV F antibody from the host cell and/or culture medium.

[0051] The present disclosure also contemplates a pharmaceutical composition comprising (i) an anti-RSV F antibody(ies) described herein, the nucleic acid sequence(s) described herein, the expression vector(s) described herein, or the host cell(s) described herein; and (ii) a pharmaceutically acceptable carrier and/or excipient. The pharmaceutical composition can be used for preventing or treating a RSV infection in a subject. In one embodiment, the subject is a human, preferably an infant.

[0052] Furthermore, the present disclosure encompasses a method of preventing or treating a Respiratory Syncytial Virus (RSV) infection in a subject (e.g., a human or a non-human), comprising administering to the subject in need thereof an effective amount of the anti-RSV F antibody(ies) described herein, the isolated nucleic acid sequence(s) described herein, the expression vector(s) described herein, or the host cell(s) described herein, optionally in association with a further prophylactic and/or therapeutic agent. In one embodiment, the further prophylactic and/or therapeutic agent is selected from an antiviral agent; a vaccine specific for RSV; a vaccine specific for influenza virus; a vaccine specific for metapneumovirus (MPV); an siRNA specific for a RSV antigen; an siRNA specific for a MPV antigen; a second anti-RSV antibody; an anti-MPV antibody; an anti-IL4R antibody; an anti-influenza antibody; and a NSAID. In some embodiments, the subject is a human, preferably an infant.

[0053] Also provided herein is a method of preventing or treating a Respiratory Syncytial Virus (RSV) infection in a human subject (e.g., an infant) comprising administering to the subject in need thereof an effective amount of the pharmaceutical composition described herein.

[0054] Additionally provided herein is a method for detecting a Respiratory Syncytial Virus (RSV) infection in a subject (e.g., a human or a non-human) comprising obtaining a sample from the subject; contacting the sample with the anti-RSV F antibody(ies) described herein; and detecting the presence of a complex between the anti-RSV F antibody and the RSV fusion glycoprotein (F), wherein detection of the complex indicates the presence of RSV. In one embodiment, the subject is a human subject, preferably an infant.

[0055] Other features and advantages of the instant invention will be apparent from the following detailed description and examples which should not be construed as limiting. The contents of all cited references, including scientific articles, patents and patent applications cited throughout this application, are expressly incorporated herein by reference.

### BRIEF DESCRIPTION OF THE FIGURES

[0056] FIGS. 1A-1C show the single B cell sorting strategy. FIG. 1A shows the gating strategy for a representative infant ≥6 months (Infant 2042), and FIG. 1B shows the gating strategy for a representative infant <3 months (Infant 2026). Lymphocytes were gated based on forward and side scatter, followed by a live/dead gate and selection of CD3⁻CD8⁻CD14⁻cells. B cells were identified by gating on CD19⁺/CD20⁺cells. IgG or IgA⁺B cells or CD19/CD20⁺B cells that showed reactivity with RSV F were single-cell sorted for antibody cloning. B cell reactivity with subtype A and subtype B is shown in the top and middle rows, respectively. The index sorting analysis is shown in the bottom panel. SSC-A, side scatter area; FSC-A, forward scatter area. FIG. 1C shows the percentage of RSV F-specific, class-switched B cells for each infant (FIG. 1C). Values were calculated based on flow cytometry data.

[0057] FIGS. 2A-2E show that anti-RSV F antibodies isolated from infant B cells display limited somatic hypermutation (SHM) and biased V_{H} and V_{L} gene usage. A representative flow plot is shown for the RSV F-specific B cell response in an infant <3 months of age (FIG. 2A) and an infant >6 months of age (FIG. 2B). Prior to sorting on double positive staining with dual labeled RSV F probes, the plot was gated on CD3 CD19⁺CD20⁺B cells (FIG. 1A) or CD3 CD19⁺CD20⁺IgG/IgA⁺B cells (FIG. 2B). RSV F-specific B cells are in the upper right quadrant of the plots. FIG. 2C shows the results of index sort analysis of the surface markers expressed on B cells from which RSV F-reactive antibodies were isolated. FIG. 2D shows the number of VH nucleotide substitutions for antibodies isolated from RSV F-specific class-switched B cells (the red bars indicate medians). In both FIG. 2C and FIG. 2D, infants are ordered from youngest to oldest, left to right. FIG. 2E shows a heat map of V_{H} and V_{L} germline gene usage for all infants (left panel), showing only genes for which at least one V_{H}/V_{L} pairing was utilized in ≥0.5% of all antibodies isolated. The percent total of antibodies with the designated V_{H}/V_{L} pairing is provided (right panel).

[0058] FIGS. 3A-3D show that a subset of RSV F-specific infant antibodies binds with high affinity to RSV F and neutralizes RSV. The fraction of isolated antibodies from each infant that binds with weak, low, medium, or high apparent affinity for preF (FIG. 3A) or postF (FIG. 3B) is shown for each antibody that displayed detectable binding in this assay. Infants are ordered from youngest to oldest, left to right. Apparent binding affinities are shown for each antibody. Black bars indicate medians. N.D., not determined. The percentage of antibodies isolated from each infant that shows weak, low, medium, or high neutralization potency is shown (FIG. 3C). Neutralization IC₅₀ values are shown for each antibody with measurable neutralization activity. Top, middle, and bottom dotted lines show IC₅₀ values for motavizumab, MPEG, and D25, respectively. Black bars indicate medians. FIG. 3D shows the apparent affinities for postF plotted against apparent affinities for preF for infants <3 months (left panel) and ≥6 months (right panel).

[0059] FIGS. 4A-4C show that RSV-neutralizing, F-conformation-independent antibodies are rare in young infants. The percentage of antibodies that are preF-specific (black), preF- and postF-reactive (grey), or postF-specific (light grey) is shown for each infant (FIG. 4A). N.D., not-determined (white). Infants are ordered from youngest to oldest, left to right. The percentage of antibodies with high, medium, low, or weak neutralization potency is plotted for each group in infants <3 mo. (left panel) and ≥6 mo. (right panel) (FIG. 4B). Neutralization IC₅₀s are shown for antibodies in each group that displayed measurable neutralization activity (FIG. 4C). Black bars indicate medians. In FIGS. 4B and 4C, antibodies for which preF and postF binding affinities were measured are grouped according to preF or postF specificity.

[0060] FIGS. 5A and 5B show that polyreactivity of infant antibodies decreases with increasing levels of somatic hypermutation. The percent of antibodies with high, medium, low, or undetectable polyreactivity is shown for each infant (FIG. 5A). Four panels of control antibodies, each with a variety of specificities, are shown for comparison: 364 RSV F-specific antibodies previously isolated from healthy adults, 138 antibodies currently in clinical trials, 39 antibodies that are approved for clinical use, and 14 broadly neutralizing HIV-1 antibodies. Infant antibodies are grouped according to the number of nucleotide mutations present in the VH gene (FIG. 5B).

[0061] FIGS. 6A-6C show that infant responses are focused toward two antigenic sites with different neutralization sensitivities. FIG. 6A shows the preF structure with two protomers as grey molecular surfaces and one protomer as ribbons colored according to the antigenic site. FIG. 6B shows the percentage of isolated antibodies that recognize each antigenic site, plotted for each donor. Infants are ordered from youngest to oldest, left to right. FIG. 6C shows antibodies isolated from infants <3 months (left panel) and ≥6 months (right panel) grouped according to neutralization potency and antigenic site. N.N., non-neturalizing.

[0062] FIGS. 7A-7E show antibodies directed towards sites I and III utilize convergent sequence features and preferentially bind to different conformations of RSV F. Heat map of VH and VL germline gene usage for all site I-directed antibodies for which at least one VH/VL pairing was used in ≥0.5% of the antibodies directed against site I (FIG. 7A). A heat map of VH and VL germline gene usage for all site III-directed antibodies for which at least one VH/VL pairing was used in ≥0.5% of the antibodies directed against site III (FIG. 7B). WebLogos showing the CDR H3 sequence motifs for site I-directed (top) and site III-directed (bottom) antibodies (FIG. 7C). Apparent binding affinities for postF are plotted against apparent affinities for preF for antibodies directed against site I and site III (FIG. 7D, left panel). Antibodies that are preF-specific are boxed in. Apparent preF affinity for preF-specific antibodies is shown (FIG. 7D, right panel). Antibodies are grouped according to antigenic site and the percentage of antibodies in each group with high, medium, low, or weak neutralization potency is shown (FIG. 7E, left panel). Neutralization IC₅₀s is plotted for the antibodies in each group with detectable neutralization activity (FIG. 7E, right panel). Top, middle, and bottom dotted lines show IC₅₀s for motavizumab, MPE8 and D25, respectively.

[0063] FIGS. 8A-8D show that germline antibodies targeting antigenic site III can potently neutralize RSV and are present in the naïve B cell repertoire. FIG. 8A shows the neutalization potency (IC₅₀) of antibodies lacking V_{H} or V_{L} nucleotide substitutions, grouped according to antigenic site. Top, middle, and bottom dotted lines show the IC₅₀ value for motavizumab, MPE8, and D25, respectively. N.N., non-neutralizing. No antibodies against site Ø lacking substitutions were obtained.

[0064] FIG. 8B shows the results of index sort analysis of the surface markers expressed on cells from which RSV-reactive antibodies were isolated in infants <3 months. The percentage of B cells in each group is shown for all antibodies, neutralizing antibodies that lack somatic mutations (germline neut.), and neutralizing antibodies that contain somatic mutations (mutated neut.). FIG. 8C contains pie charts showing the fraction of RSV F-reactive naïve B cells isolated from the cord blood of four donors (top panel) and peripheral blood from two donors (bottom panel) that utilized VH3-21/VL1-40 or VH3-11/VL1-40 germline gene pairing. Naïve B cells were defined as CD3⁻CD14⁻CD19⁺CD20⁺IgM⁺IgG⁻CD27⁻ cells. The number in the center of the pie (top and bottom) inidcates the total number of antibodies with detectible binding to RSV F when produced as full-length IgG. FIG. 8D shows the apparent affinity for preF for each of these antibodies and colored according to germline usage. Black bars indicate medians. IC₅₀ values for antibodies that displayed detectible neutralizing activity.

[0065] FIGS. 9A-9D shows the non-neutralizing antibody ADI-14359 uses a convergent CDR H3 motif and germline features of the VK1-39 light chain for binding to antigenic site I on postF. FIG. 9A shows a crystal structure of infant antibody ADI-14359 (VH2-70/VK1-39) in complex with postF. FIG. 9B shows a magnified view of the CDRH3 of ADI-14359 inserted into a groove on the surface of postF. The variable region of ADI-14359 and one RSV F protomer are shown as ribbons and the C-α atom of Pro389, a residue associated with viral escape from site I-directed antibodies, is shown as a sphere. FIG. 9C shows a magnified view of the antibody interface, highlighting the features of the convergent CDR H3 motif that mediate recognition of site I (left panel), whereas a 180° rotation highlights the CDR H2 contacts made with postF (right panel). The sequence logo for the convergent CDR H3 motif is shown (generated using WebLogo, described by Crooks et al., 2004). FIG. 9D shows the binding of ADI-14359 to postF as measured by surface plasmon resonance (top panel). Rate constants for the germline-reverted variant (R50L) binding to postF were too fast to be accurately determined (top middle panel) and, therefore, the equilibrium responses were plotted against the concentration of Fab and fit to a steady-state affinity model (bottom middle panel). Binding of ADI-14359 to the K390A variant of postF was too weak to determine an affinity (bottom panel).

[0066] FIGS. 10A-10D show that the light chain mediates postF preference of ADI-14359. The crystal structure of ADI-14359 (VH2-70/VK1-39) in complex with postF is shown at a 180° rotation with respect to FIG. 9 (FIG. 10A). Two protomers of postF are shown as molecular surfaces and the third protomer and ADI-14359 are shown as ribbons. The ADI-14359 heavy chain is gray and the light chain is white. The position of the fused viral and host-cell membranes is shown for orientation. The predicted interaction between preF and ADI-14359 was predicted by aligning the unbound preF structure to the ADI-14359-bound postF structure (FIG. 10B). The unfused viral membrane is shown for orientation. A magnified view of the ADI-14359-postF interface (FIG. 10C). One protomer is shown in ribbons. The ADI-14359 light chain CDR1 and FW3 form hydrogen bonds with two residues on β1 (Glu31 and Tyr33). A magnified view of the predicted ADI-14359-preF interface (FIG. 10D). In preF, (322 blocks access to β1 and would clash with the ADI-14359 light chain FW3 and CDR1. In addition, Glu31 is rotated away from ADI-14359 in preF, which would prevent hydrogen bonding with this residue.

[0067] FIGS. 11A-11C show that neutralizing antibody ADI-19425 uses germline-encoded features for high-affinity binding to antigenic site III on preF. FIG. 11A shows a crystal structure of ADI-19425 in complex with preF viewed along (left panel) and above (right panel) the viral membrane. FIG. 11B shows a magnified view of the interface with the variable region of ADI-19425 and one RSV F protomer shown in ribbon (left panel) and a 90-degree rotation showing the interactions between the light chain of ADI-19425 and the α6-α7 loop of antigenic site II (right panel). FIG. 11C shows the binding of ADI-19425 and the Y33A, Y93A and Y56A variants to preF as measured by surface plasmon resonance.

[0068] FIGS. 12A-12D show ADI-19425 and MPE8 utilize similar germline-encoded features to recognize preF. A ternary crystal structure of preF, 3 AM22 Fabs, and 3 ADI-19425 Fabs was generated (FIG. 12A, left and right panels). The right panel shows the same complex in the left panel, but rotated by 90° to show the view looking toward the viral membrane. Neutralization of two strains of RSV (A2 and B10895) by ADI-19425 IgG was measured using the fluorescence plate reader assay (FIG. 12B). The preF-bound MPE8 Fv was aligned to preF bound by ADI-19425 (FIG. 12C, left and right panels). The right panel is rotated by 90° relative to the left panel to show the top view. The MPE8 Fv is aligned to that of ADI-19425 (FIG. 12D, left and right panels). The right panel shows the binding interface between preF and ADI-19425, with the same orientation shown in FIG. 11B. The CDR loops are shown for both ADI-19425 and MPE8.

[0069] FIGS. 13A-C show analysis of RSV F-specific B cell responses in the adenoids and peripheral blood of young children. RSV F-specific B cells were measured in adenoid and peripheral blood by flow cytometry (FIG. 13A, left, middle, and right panels). The left panel shows the frequency of RSV F-specific B cells among CD19⁺B cells in adenoid for a representative donor. The middle panel shows the frequency of RSV F-specific B cells among CD19⁺B cells in PBMCs for a representative donor. The frequency of RSV F-reactive B cells within the CD14⁻CD3⁻CD8⁻CD19⁺CD20⁺population is shown next to the gate. The right panel shows a summary for all 6 donors analyzed. Index sort analysis of surface markers expressed on B cells from which RSV F-reactive antibodies were isolated (FIG. 13B). Percentage of RSV F-reactive B cells within each memory B cell subset that express FCRL4 (FIG. 13C). Asterisks indicate B cell responses that were below the limit of detection.

[0070] FIGS. 14A-B show the lack of a clear correlation between the frequency of RSV F-reactive B cells in either compartment and serum neutralization titer. FIG. 14A shows the percentage of RSV F-specific B cells among CD19⁺B cells in the adenoids and PBMCs for a representative donor.

[0071] FIG. 14B shows the percentage of RSV F-specific B cells among CD19⁺B cells in the adenoids (left panel) and in the PBMCs (right panel) for a representative donor.

[0072] FIGS. 15A-C characterize the RSV-specific mucosal B cell response. FIG. 15A shows that the RSV F-specific antibody repertoires were highly diverse in both compartments (adenoids and PBMCs) in all donors, each containing few to no expanded clonal lineages. FIG. 15B shows the CDRH3 length distribution of the antibodies isolated from PBMCs and adenoids. FIG. 15C shows a comparable VH germline gene usage between the two compartments, though there was an enrichment for VH5-51 and VH1-69 in the adenoid-derived antibodies and an enrichment for VH4-34 and VH3-30 in the PBMC-derived antibodies.

[0073] FIGS. 16A-E show the level of somatic mutation in the antibodies was varied among the 4 donors. FIG. 16A shows the the median number of VH nucleotide substitutions ranged from 8-11 in the adenoid-derived antibodies and 7-9 in the PBMC-derived antibodies. **** indicates that the difference in number of substitutions in the adenoid-derived antibodies relative to the PBMC-derived antibodies reached statistical significance in Donor 2665. FIG. 16B compares the levels of SHM within each individual B cell subset in adenoids (left panel) and PBMCs (right panel). FIG. 16C shows the the percentage of antibodies derived from IgG-IgA-CD27-peripheral blood B cells containing SHM. FIG. 16D shows a subset of somatically mutated antibodies derived from IgG-IgA-CD27−peripheral blood B cells that contained lower levels of SHM compared to antibodies derived from IgG−IgA−CD27−adenoid B cells. FIG. 16E shows the IgM and IgD expression profiles of RSV F-specific IgG−IgA−CD27−adenoid B cells.

[0074] FIGS. 17A-D show the number of VH nucleotide substitutions in the adenoid-derived antibodies and PBMC-derived antibodies for each donor. FIG. 17A shows the number of VH nucleotide substitutions for Donor 2635. FIG. 17B shows the number of VH nucleotide substitutions for Donor 2665. **** indicates that the difference in number of substitutions in the adenoid-derived antibodies relative to the PBMC-derived antibodies reached statistical significance in Donor 2665.

[0075] FIG. 17C shows the number of VH nucleotide substitutions for Donor 2666. FIG. 17D shows the number of VH nucleotide substitutions for Donor 2849.

[0076] FIGS. 18A-B show the binding properties of the adenoid and PBMC-derived antibodies. FIG. 18A shows the percentage of antibodies that bind RSV preF, postF, and preF & postF using biolayer interferometry. FIG. 18B shows the percentage of antibodies that bind preF with weak (>50 nm), low (>5 to 50 nM), medium (>0.5 to 5 nM), and high (<0.5 nM) binding affinities.

[0077] FIGS. 19A-D show the neutralizing activity of the adenoid and PBMC-derived antibodies against RSV-A2. FIG. 19A shows the amount of detectable neutralizing activity (IC50<25 μg/mL) for adenoid and PBMC-derived antibodies using a luciferase-based assay. FIG. 19B shows the neutralization actity of preF-specific antibodies, postF-specific antibodies, and preF and PostF reactive antibodies isolated from both adenoids and PBMCs. FIG. 19C shows the memory B cell subsets for the adenoid-derived and PBMC-derived neutralizing antibodies. FIG. 19D shows the apparent preF K_{D} (left panel) and the virus neutralization IC50 for each memory B cell subset.

[0078] FIGS. 20A-C shows the levels of polyreactivity and binding affinities of the antibodies derived from the adenoid and PBMC samples. FIG. 20A shows the percentage of antibodies having low and high levels of polyreactivity. FIG. 20B shows the percentage of low and high polyreactive clones across different B cell subsets within each compartment (left panel shows adenoid-derived antibodies and right panel shows PBMC-derived antibodies). FIG. 20C shows the percentage of antibodies having no binding or low, medium, or high affinity to RSV F.

### DETAILED DESCRIPTION OF THE INVENTION

[0079] The present disclosure relates anti-RSV F infant antibodies, compositions comprising such antibodies, and methods for obtaining and using such antibodies. In some embodiments, the antibodies are neutralizing antibodies and, thus, the anti-RSV F neutralizing antibodies and compositions comprising such antibodies can be used as a vaccine. For infants, in particular, the subject anti-RSV F antibodies may provide advantagous protection.

### Definitions

[0080] In order that the present disclosure may be more readily understood, certain terms are first defined. As used in this application, except as otherwise expressly provided herein, each of the following terms shall have the meaning set forth below. Additional definitions are set forth throughout the application. Unless defined otherwise, all technical and scientific terms used herein have the same meaning as commonly understood by one of ordinary skill in the art to which this invention belongs.

[0081] As used herein, the term “about,” when used in reference to a particular recited numerical value, means that the value may vary from the recited value by no more than 1%. For example, as used herein, the expression “about 100” includes 99 and 101 and all values in between (e.g., 99.1, 99.2, 99.3, 99.4, etc.).

[0082] “Respiratory Syncytial Virus fusion glycoprotein”, also referred to as “RSV F”, is a type I transmembrane surface protein that has an N terminal cleaved signal peptide and a membrane anchor near the C terminus (Collins, P. L. et al., (1984), PNAS (USA) 81:7683-7687). The RSV F protein is synthesized as an inactive 67 KDa precursor denoted as F0 (Calder, L. J.; et al., Virology (2000), 277,122-131. The F0 protein is activated proteolytically in the Golgi complex by a furin-like protease at two sites, yielding two disulfide linked polypeptides, F2 and F1, from the N and C terminal, respectively. There is a 27 amino acid peptide released called “pep27”. There are furin cleavage sites (FCS) on either side of the pep27 (Collins, P. L.; Mottet, G. (1991), J. Gen. Virol., 72: 3095-3101; Sugrue, R. J, et al. (2001), J. Gen. Virol., 82,1375-1386). The F2 subunit consists of the Heptad repeat C (HRC), while the F1 contains the fusion polypeptide (FP), heptad repeat A (HRA), domain I, domain II, heptad repeat B (HRB), transmembrane (TM), and cytoplasmic domain (CP) (See Sun, Z. et al. Viruses (2013), 5:21 1-225). The RSV F protein plays a role in fusion of the virus particle to the host cell membrane by irreversible protein refolding from the labile prefusion conformation (herein referred to as “prefusion F” or “preF”) to the stable postfusion conformation (herein referred to as “postfusion F” or “postF”). RSV F is expressed on the surface of infected cells. Accordingly, it plays a role in cell to cell transmission of the virus and syncytia formation. The amino acid sequence of the RSV F protein is provided in GenBank as accession number AAX23994.

[0083] A stabilized variant of the PreF trimeric conformation of RSV F, termed “RSV-DS-Cav1” or “DS-Cav1” disclosed in, inter alia, Stewart-Jones et al., PLos One, Vol. 10(6)):e0128779. doi: 10.1371/journal.pone.0128779 and WO 2011/050168 was used in the identification, isolation, and characterization of the disclosed antibodies.

[0084] The term “laboratory strain” as used herein refers to a strain of RSV (subtype A or subtype B) that has been passaged extensively in in vitro cell culture. A “laboratory strain” can acquire adaptive mutations that may affect their biological properties. The term “clinical strain” as used herein refers to an RSV isolate (subtype A or subtype B), which is obtained from an infected individual and has been isolated and grown in tissue culture at low passage.

[0085] The term “IC₅₀” refers to the “half maximal inhibitory concentration”, which value measures the effectiveness of compound (e.g., anti-RSV F antibody) inhibition towards a biological or biochemical utility. This quantitative measure indicates the quantity required for a particular inhibitor to inhibit a given biological process by half. In certain embodiments, RSV virus neutralization potencies for anti-RSV neutralizing antibodies disclosed herein are expressed as neutralization IC₅₀ values.

[0086] The term “infant”, as used herein, generally refers to a young child between one month and one year (12 months) of age; however, it can also apply to a child older than 1 year (12 months). In one embodiment, the infant is at least (>) 6 months of age. In another embodiment, the infant is under 3 months of age.

[0087] The term “subject”, as used herein, refers to a human or a nonhuman. The term “nonhuman” includes, but is not limited to, domestic animals (such as horses, dogs and cats) and livestock (such as cattle, sheep, swine, and poultry). In some embodiments, the subject is a human (and, more preferably, a human infant). The term “subject” may be interchangeably used with the term “patient” in the context of the present disclosure.

[0088] “Motavizumab”, also referred to as “NUMAX™”, is an enhanced potency RSV F-specific humanized monoclonal antibody derived by in vitro affinity maturation of the CDRs of the heavy and light chains of palivizumab. For reference purposes, the amino acid sequence of the NUMAX™ antibody is disclosed in U.S. Patent Publication 2003/0091584; U.S. Pat. No. 6,818,216; Wu et al., (2005) J. Mol. Bio. 350(1):126-144; and Wu, et al. (2007) J. Mol. Biol. 368:652-665.

[0089] “Palivizumab”, also referred to as “SYNAGIS®”, is a humanized anti-RSV F antibody with heavy and light chain variable domains having the amino acid sequences as set forth in U.S. Pat. Nos. 7,635,568 and 5,824,307. Palivizumab immunospecifically binds to the RSV F protein, and is currently FDA-approved for the passive immunoprophylaxis of serious RSV disease in high-risk children. It is administered intramuscularly at recommended monthly doses of 15 mg/kg of body weight throughout the RSV season (November through April in the northern hemisphere). SYNAGIS® is composed of 95% human and 5% murine antibody sequences. See also Johnson et al., (1997), J. Infect. Diseases 176:1215-1224.

[0090] “MPE8” is a human monoclonal antibody (MPE8), generated by Humabs BioMed SA, that binds to antigenic site III of RSV F and potently cross-neutralizes RSV and HMPV. For reference purposes, the amino acid sequence of the MPE8 antibody is disclosed in Corti et al., 2013.

[0091] “D25” is a human IgG1 kappa monoclonal antibody, developed by AIMM Therapeutics B.V. in partnership with MedImmune, which binds to antigenic site Ø on RSV F and neutralizes RSV with high efficiency. For reference purposes, the amino acid sequence of the D25 antibody is disclosed in U.S. Pat. No. 8,562,996.

[0092] As used herein, the terms “treat,” “treatment,” and “treating” refer to the reduction, alleviation, or amelioration of the progression, development, recurrence, severity, and/or duration of an upper and/or lower respiratory tract RSV infection or a symptom, complication, respiratory condition related thereto (such as pneumonia or bronchiolitis) resulting from the administration of one or more therapies (including, but not limited to, the administration of one or more prophylactic or therapeutic agents alone or in combination). In certain embodiments, such terms refer to the reduction or inhibition of the replication of RSV, the inhibition or reduction in the spread of RSV to other tissues or subjects (e.g., the spread to the lower respiratory tract), the inhibition or reduction of infection of a cell with a RSV, or the amelioration of one or more symptoms associated with an upper and/or lower respiratory tract RSV infection.

[0093] As used herein, the terms “prevent,” “preventing,” and “prevention” refer to the prevention or inhibition of the development or onset of an upper and/or lower respiratory tract RSV infection or a respiratory condition related thereto resulting from the administration of one or more therapies (including, but not limited to, the administration of one or more prophylactic or therapeutic agents alone or in combination).

[0094] The term “antibody” (“Ab”), as used herein, refers to an immunoglobulin molecule that binds specifically to an antigen and comprises four polypeptide chains, two heavy (H) chains and two light (L) chains interconnected by disulfide bonds (i.e., “full antibody molecules”) or an antigen-binding fragment thereof. Each heavy chain is comprised of a heavy chain variable region (“HCVR” or “V_{H}”) and a heavy chain constant region (comprised of domains C_{H}1, C_{H}2, and C_{H}3). Each light chain is comprised of a light chain variable region (“LCVR” or “V_{L}”) and a light chain constant region (C_{L}). The variable regions of the heavy and light chains contain a binding domain that interacts with an antigen. The constant regions of the antibodies may mediate the binding of the immunoglobulin to host tissues or factors, including various cells of the immune system (e.g., effector cells) and the first component (C1q) of the classical complement system.

[0095] The V_{H} and V_{L} regions can be further subdivided into regions of hypervariability, termed complementarity determining regions (CDRs), interspersed with regions that are more conserved, termed framework regions (FRs). Each V_{H} and V_{L} is composed of three CDRs and four FRs, arranged from amino-terminus to carboxy-terminus in the following order: FR1, CDR1, FR2, CDR2, FR3, CDR3, FR4. In certain embodiments of the invention, the FRs of the antibody (or antigen binding fragment thereof) may be identical to the human germline sequences, or may be naturally or artificially modified. An amino acid consensus sequence may be defined based on a side-by-side analysis of two or more CDRs. Accordingly, the CDRs in a heavy chain are designated “CHRH1”, “CDRH2”, and “CDRH3”, respectively, and the CDRs in a light chain are designated “CDRL1”, “CDRL2”, and “CDRL3”.

[0096] Substitution of one or more CDR residues or omission of one or more CDRs is also possible. Antibodies have been described in the scientific literature in which one or two CDRs can be dispensed with for binding. Analysis of the contact regions between antibodies and their antigens, based on published crystal structures, concluded that only about one fifth to one third of CDR residues actually contact the antigen (Padlan et al. (1995 FASEB J. 9:133-139). Also, it has been shown that in many antibodies one or two CDRs had no amino acids in contact with an antigen (see also, Vaj dos et al. 2002 J Mol Biol 320:415-428).

[0097] CDR residues not contacting antigen can be identified based on previous studies (for example, residues H60-H65 in CDRH2 are often not required), from regions of Kabat CDRs lying outside Chothia CDRs, by molecular modeling and/or empirically. If a CDR or residue(s) thereof is/are omitted, it is usually substituted with an amino acid occupying the corresponding position in another human antibody sequence or a consensus of such sequences. Positions for substitution within CDRs and amino acids to substitute can also be selected empirically.

[0098] The fully human monoclonal antibodies disclosed herein may comprise one or more amino acid substitutions, insertions and/or deletions in the framework and/or CDR regions of the heavy and light chain variable domains as compared to the corresponding germline sequences. Such mutations can be readily ascertained by comparing the amino acid sequences disclosed herein to germline sequences available from, for example, public antibody sequence databases. The present invention includes antibodies, and antigen-binding fragments thereof, that are derived from any of the amino acid sequences disclosed herein, wherein one or more amino acids within one or more framework and/or CDR regions are mutated to the corresponding residue(s) of the germline sequence from which the antibody was derived, or to the corresponding residue(s) of another human germline sequence, or to a conservative amino acid substitution of the corresponding germline residue(s) (such sequence changes are referred to herein collectively as “germline mutations”). A person of ordinary skill in the art, starting with the heavy and light chain variable region sequences disclosed herein, can easily produce numerous antibodies and antigen-binding fragments which comprise one or more individual germline mutations or combinations thereof. In certain embodiments, all of the framework and/or CDR residues within the V_{H} and/or V_{L} domains are mutated back to the residues found in the original germline sequence from which the antibody was derived. In other embodiments, only certain residues are mutated back to the original germline sequence, e.g., only the mutated residues found within the first 8 amino acids of FR1 or within the last 8 amino acids of FR4, or only the mutated residues found within CDR1, CDR2 or CDR3. In other embodiments, one or more of the framework and/or CDR residue(s) are mutated to the corresponding residue(s) of a different germline sequence (i.e., a germline sequence that is different from the germline sequence from which the antibody was originally derived). Furthermore, the antibodies of the present invention may contain any combination of two or more germline mutations within the framework and/or CDR regions, e.g., wherein certain individual residues are mutated to the corresponding residue of a particular germline sequence while certain other residues that differ from the original germline sequence are maintained or are mutated to the corresponding residue of a different germline sequence. Once obtained, antibodies and antigen-binding fragments that contain one or more germline mutations can be easily tested for one or more desired property such as, improved binding specificity, increased binding affinity, improved or enhanced antagonistic or agonistic biological properties (as the case may be), reduced immunogenicity, etc. Antibodies and antigen-binding fragments obtained in this general manner are encompassed within the present invention.

[0099] An immunoglobulin may derive from any of the commonly known isotypes, including but not limited to IgA, secretory IgA, IgG, and IgM. IgG subclasses are well known to those in the art and include, but are not limited to, human IgG1, IgG2, IgG3, and IgG4. “Isotype” refers to the antibody class or subclass (e.g., IgG1) that is encoded by the heavy chain constant region genes. The term “antibody” includes, by way of example, both naturally occurring and non-naturally occurring antibodies; monoclonal antibodies (“mAb”) and polyclonal antibodies; chimeric and humanized antibodies; human or non-human antibodies; wholly synthetic antibodies; and single chain antibodies. Where not expressly stated, and unless the context indicates otherwise, the term “antibody” includes an antigen-binding fragment or an antigen-binding portion of any of the aforementioned immunoglobulins, a monovalent and a divalent fragment or portion, and a single chain antibody.

[0100] The term “human antibody”, as used herein, is intended to include antibodies having variable and constant regions derived from human germline immunoglobulin sequences (and, thus, does not include antibodies in which CDRs derived from the germline of another mammalian species (e.g., mouse) have been grafted onto human FR sequences). The human antibodies of the invention may include amino acid residues not encoded by human germline immunoglobulin sequences (e.g., mutations introduced by random or site-specific mutagenesis in vitro or by somatic mutation in vivo), for example in the CDRs, in particular CDR3.

[0101] The term “humanized antibody”, as used herein, refers to a human antibody in which one or more CDRs have been replaced with one or more corresponding CDRs obtained a non-human derived (e.g., mouse, rat, rabbit, primate) antibody. Humanized antibodies may also include certain non-CDR sequences or residues derived from such non-human antibodies as well as the one or more non-human CDR sequence. Such antibodies may also be referred to as “chimeric antibodies”.

[0102] The term “recombinant” generally refers to any protein, polypeptide, or cell expressing a gene of interest that is produced by genetic engineering methods. The term “recombinant” as used herein with respect to a protein or polypeptide, means a polypeptide produced by expression of a recombinant polynucleotide. The proteins used in the immunogenic compositions of the invention may be isolated from a natural source or produced by genetic engineering methods.

[0103] The antibodies of the invention may, in some embodiments, be recombinant human antibodies. The term “recombinant human antibody”, as used herein, is intended to include all antibodies (including human or humanized antibodies) that are prepared, expressed, created, or isolated by recombinant means, such as antibodies expressed using a recombinant expression vector transfected into a host cell (described further below); antibodies isolated from a recombinant, combinatorial human antibody library (described further below); antibodies isolated from an animal (e.g., a mouse) that is transgenic for human immunoglobulin genes (see, e.g., Taylor et al. (1992) Nucl. Acids Res. 20:6287-6295); or antibodies prepared, expressed, created or isolated by any other means that involve splicing of human immunoglobulin gene sequences to other DNA sequences. Such recombinant human antibodies have variable and constant regions derived from human germline immunoglobulin sequences. In certain embodiments, however, such recombinant human antibodies are subjected to in vitro mutagenesis (or, when an animal transgenic for human Ig sequences is used, in vivo somatic mutagenesis) and thus the amino acid sequences of the V_{H} and V_{L} regions of the recombinant antibodies are sequences that, while derived from and related to human germline V_{H} and V_{L} sequences, may not naturally exist within the human antibody germline repertoire in vivo.

[0104] The terms “specifically binds” or “binds specifically to” are used interchangeably and mean that an antibody or antigen-binding fragment thereof forms a complex with an antigen that is relatively stable under physiologic conditions. Specific binding can be characterized by an equilibrium dissociation constant of at least about 1×10⁻⁶ M or less (e.g., a smaller K_{D} denotes a tighter binding). Methods for determining whether two molecules specifically bind are well known in the art and include, for example, equilibrium dialysis, surface plasmon resonance, and the like. As described herein, antibodies have been identified by surface plasmon resonance, e.g., BIACORE™, biolayer interferometry measurements using, e.g., a ForteBio Octet HTX instrument (Pall Life Sciences), which bind specifically to RSV F. Moreover, multi-specific antibodies that bind to RSV F protein and one or more additional antigens, or a bi-specific that binds to two different regions of RSV F, are nonetheless considered antibodies that “specifically bind”. In certain embodiments, the antibodies disclosed herein display equilibrium dissociation constants (and hence specificities) of about 1×10⁻⁶ M; about 1×10⁻⁷ M; about 1×10⁻⁸M; about 1×10⁻⁹M; about 1×10⁻¹⁰ about 1×10⁻¹¹ M; about 1×10⁻¹² M; M; between about 1×10⁻⁷M and about 1×10⁻¹¹M; or between about 1×10⁻⁸M and about 1×10⁻¹⁰ M.

[0105] The term “high affinity antibody” refers to those antibodies having a binding affinity to RSV F (preF or postF) of about ≤0.5 nM as measured by surface plasmon resonance, e.g., BIACORE™, biolayer interferometry measurements using, e.g., a ForteBio Octet HTX instrument (Pall Life Sciences).

[0106] The term “medium affinity antibody” refers to those antibodies having a binding affinity to RSV F of about >0.5 to 5 nM as measured by surface plasmon resonance, e.g., BIACORE™ biolayer interferometry measurements using, e.g., a ForteBio Octet HTX instrument (Pall Life Sciences).

[0107] The term “low affinity antibody” refers to those antibodies having a binding affinity to RSV F of about >5 to 50 nM as measured by surface plasmon resonance, e.g., BIACORE™, biolayer interferometry measurements using, e.g., a ForteBio Octet HTX instrument (Pall Life Sciences).

[0108] The term “weak affinity antibody” refers to those antibodies having a binding affinity to RSV F of about >50 nM as measured by surface plasmon resonance, e.g., BIACORE™, biolayer interferometry measurements using, e.g., a ForteBio Octet HTX instrument (Pall Life Sciences).

[0109] The terms “antigen-binding portion” and “antigen-binding fragment” are used interchangeably and refer to any naturally occurring, enzymatically obtainable, synthetic, or genetically engineered polypeptide or glycoprotein that specifically binds an antigen to form a complex. In certain embodiments, the terms “antigen-binding portion” and “antibody fragment” refer to one or more fragments of an antibody that retains the ability to bind to RSV F.

[0110] An antibody fragment may include a Fab fragment, a F(ab′)₂ fragment, a Fv fragment, a dAb fragment, a fragment containing a CDR, or an isolated CDR. Antigen-binding fragments of an antibody may be derived, e.g., from full antibody molecules using any suitable standard techniques such as proteolytic digestion or recombinant genetic engineering techniques involving the manipulation and expression of DNA encoding antibody variable and (optionally) constant domains. Such DNA is known and/or is readily available from, e.g., commercial sources, DNA libraries (including, e.g., phage-antibody libraries), or can be synthesized. The DNA may be sequenced and manipulated chemically or by using molecular biology techniques, for example, to arrange one or more variable and/or constant domains into a suitable configuration, or to introduce codons, create cysteine residues, modify, add, or delete amino acids, etc.

[0111] Non-limiting examples of antigen-binding fragments include: (i) Fab fragments; (ii) F(ab′)2 fragments; (iii) Fd fragments; (iv) Fv fragments; (v) single-chain Fv (scFv) molecules; (vi) dAb fragments; and (vii) minimal recognition units consisting of the amino acid residues that mimic the hypervariable region of an antibody (e.g., an isolated complementarity determining region (CDR) such as a CDR3 peptide), or a constrained FR3-CDR3-FR4 peptide. Other engineered molecules, such as domain-specific antibodies, single domain antibodies, domain-deleted antibodies, chimeric antibodies, CDR-grafted antibodies, diabodies, triabodies, tetrabodies, minibodies, nanobodies (e.g., monovalent nanobodies, bivalent nanobodies, etc.), small modular immunopharmaceuticals (SMIPs), and shark variable IgNAR domains, are also encompassed by “antigen-binding fragment” and “antigen-binding portion”.

[0112] An antigen-binding fragment of an antibody will typically comprise at least one variable domain. The variable domain may be of any size or amino acid composition and will generally comprise at least one CDR, which is adjacent to or in frame with one or more framework sequences. In antigen-binding fragments having a V_{H} domain associated with a V_{L} domain, the V_{H} and V_{L} domains may be situated relative to one another in any suitable arrangement. For example, the variable region may be dimeric and contain V_{H}-V_{H}, V_{H}-V_{L}, or V_{L}-V_{L} dimers. Alternatively, the antigen-binding fragment of an antibody may contain a monomeric V_{H} or V_{L} domain.

[0113] In certain embodiments, an antigen-binding fragment of an antibody may contain at least one variable domain covalently linked to at least one constant domain. Non-limiting, exemplary configurations of variable and constant domains that may be found within an antigen-binding fragment of an antibody of the present invention include: (i) V_{H}-C_{H}1; V_{H}—C_{H}2; V_{H}—C_{H}3; (iv) V_{H}—Cₕ2; (v) V_{H}-Cₕl-Cₕ2-Cₕ3; (vi) V_{H}-C_{H}2-C_{H}3; (vii) V_{H}-C_{L}; V_{L}—C_{H}1; (ix) V_{L} C_{H}2; (x) V_{L}-C_{H}3; (xi) V_{L}-C_{H}1-C_{H}2; (xii) V_{L}-C_{H}1-C_{H}2-C_{H}3; (xiii) V_{L}-C_{H}2-C_{H}3; and (xiv) V_{L}-C_{L}. In any configuration of variable and constant domains, including any of the exemplary configurations listed above, the variable and constant domains may be either directly linked to one another or may be linked by a full or partial hinge or linker region. A hinge region may consist of at least 2 (e.g., 5, 10, 15, 20, 40, 60 or more) amino acids, which result in a flexible or semi-flexible linkage between adjacent variable and/or constant domains in a single polypeptide molecule. Moreover, an antigen-binding fragment of an antibody of the present invention may comprise a homo-dimer or hetero-dimer (or other multimer) of any of the variable and constant domain configurations listed above in non-covalent association with one another and/or with one or more monomeric V_{H} or V_{L} domain (e.g., by disulfide bond(s)).

[0114] As with full antibody molecules, antigen-binding fragments may be mono-specific or multi-specific (e.g., bi-specific). A multi-specific antigen-binding fragment of an antibody typically comprises at least two different variable domains, wherein each variable domain is capable of specifically binding to a separate antigen or to a different epitope on the same antigen. Any multi-specific antibody format, including the exemplary bi-specific antibody formats disclosed herein, may be adapted for use in the context of an antigen-binding fragment of an antibody of the present invention using routine techniques available in the art.

[0115] In certain embodiments, the antibody or antibody fragment is mono-specific, bi-specific, or multi-specific. Multi-specific antibodies may be specific for different epitopes of one target polypeptide or may contain antigen-binding domains specific for epitopes of more than one target polypeptide. An exemplary bi-specific antibody format that can be used in the context of the present invention involves the use of a first immunoglobulin (Ig) C_{H}3 domain and a second Ig C_{H}3 domain, wherein the first and second Ig C_{H}3 domains differ from one another by at least one amino acid, and wherein at least one amino acid difference reduces binding of the bi-specific antibody to Protein A as compared to a bi-specific antibody lacking the amino acid difference. In one embodiment, the first Ig C_{H}3 domain binds Protein A and the second Ig C_{H}3 domain contains a mutation that reduces or abolishes Protein A binding such as an H95R modification (by IMGT exon numbering; H435R by EU numbering). The second C_{H}3 may further comprise an Y96F modification (by IMGT; Y436F by EU). Further modifications that may be found within the second C_{H}3 include: D16E, L18M, N44S, K52N, V57M, and V82I (by IMGT; D356E, L358M, N384S, K392N, V397M, and V422I by EU) in the case of IgG1 monoclonal antibodies; N44S, K52N, and V82I (IMGT; N384S, K392N, and V422I by EU) in the case of IgG2 monoclonal antibodies; and Q15R, N44S, K52N, V57M, R69K, E79Q, and V82I (by IMGT; Q355R, N384S, K392N, V397M, R409K, E419Q, and V422I by EU) in the case of IgG4 monoclonal antibodies. Variations of these bi-specific antibody formats are also encompassed within the scope of the present invention.

[0116] The antibodies provided herein can be derivatized or linked to another functional molecule (e.g., another peptide or protein). Accordingly, the antibodies of the invention are intended to include derivatized and otherwise modified forms of the anti-RSV F antibodies described herein. For example, an antibody can be functionally linked (e.g., by chemical coupling, genetic fusion, noncovalent association or otherwise) to one or more other molecular entities, such as another antibody (e.g., a bispecific antibody or a diabody), a detectable agent, a cytotoxic agent, a pharmaceutical agent, and/or a protein or peptide that can mediate associate of the antibody or antibody portion with another molecule (such as a streptavidin core region or a polyhistidine tag).

[0117] One type of derivatized antibody is produced by crosslinking two or more antibodies (of the same type or of different types, e.g., to create bispecific antibodies, which is also discussed below).

[0118] Exemplary detectable agents with which an antibody of the invention may be derivatized include fluorescent compounds (such as, but not limited to, fluorescein, fluorescein isothiocyanate, rhodamine, 5-dimethylamine-1-napthalenesulfonyl chloride, phycoerythrin and the like). An antibody may also be derivatized with detectable enzymes (such as, but not limited to, alkaline phosphatase, horseradish peroxidase, glucose oxidase and the like). When an antibody is derivatized with a detectable enzyme, it can be detected by adding additional reagents that the enzyme uses to produce a detectable reaction product (e.g., when the detectable agent horseradish peroxidase is present, the addition of hydrogen peroxide and diaminobenzidine leads to a colored reaction product, which is detectable). An antibody may also be derivatized with biotin, and detected through indirect measurement of avidin or streptavidin binding. Such derivatized anti-RSV F antibodies may be useful for the detection and/or diagnosis of RSV in a subject.

[0119] The specific embodiments, antibodies, or antibody fragments of the invention may be conjugated to a therapeutic moiety (“immunoconjugate”), such as an antibiotic, a second anti-RSV F antibody, a vaccine, a toxoid, or any other therapeutic moiety useful for treating an RSV infection.

[0120] The antibodies of the invention can also be modified by pegylation. An antibody can be pegylated to, for example, increase the biological (e.g., serum) half-life of the antibody. To pegylate, an antibody typically is reacted with a polyethylene glycol (PEG) reagent, such as a reactive ester or aldehyde derivative of PEG, under conditions in which one or more PEG groups become attached to the antibody or antibody fragment. Preferably, the pegylation is carried out via an acylation reaction or an alkylation reaction with a reactive PEG molecule (or an analogous reactive water-soluble polymer). As used herein, the term “polyethylene glycol” is intended to encompass any of the forms of PEG that have been used to derivatize other proteins, such as mono (C1-C10) alkoxy- or aryloxy-polyethylene glycol or polyethylene glycol-maleimide. In certain embodiments, the antibody to be pegylated is an aglycosylated antibody. Methods for pegylating proteins are known in the art and can be applied to the antibodies described herein. See for example, EP 0154316 by Nishimura et al. and EP 0401384 by Ishikawa et al.

[0121] The term an “isolated antibody”, as used herein, is intended to refer to an antibody that is substantially free of other antibodies having different antigenic specificities (e.g., an isolated antibody that specifically binds RSV F, or a fragment thereof, is substantially free of antibodies that specifically bind antigens other than RSV F).

[0122] The term a “blocking antibody” or a “neutralizing antibody”, as used herein (or an “antibody that neutralizes RSV F”), is intended to refer to an antibody whose binding to RSV F results in inhibition of at least one biological activity of RSV F. For example, such an antibody may aid in blocking the fusion of RSV to a host cell, prevent syncytia formation, and/or prevent the primary disease caused by RSV. Alternatively, or in addition, such an antibody may demonstrate the ability to ameliorate at least one symptom of the RSV infection. This inhibition of the biological activity of RSV F can be assessed by measuring one or more indicators of RSV F biological activity using standard in vitro assays (such as a neutralization assay) or in vivo assays known in the art (such as animal models to look at protection from challenge with RSV following administration of one or more of the antibodies described herein).

[0123] The term “surface plasmon resonance”, as used herein, refers to an optical phenomenon that allows for the analysis of real-time biomolecular interactions by detection of alterations in protein concentrations within a biosensor matrix, for example using the BIACORE™ system (Pharmacia Biosensor AB, Uppsala, Sweden and Piscataway, N.J.).

[0124] The term “K_{D}”, as used herein, is intended to refer to the equilibrium dissociation constant of a particular antibody-antigen interaction.

[0125] The term “epitope”, as used herein, refers to an antigenic determinant that interacts with a specific antigen binding site in the variable region of an antibody molecule known as a paratope. A single antigen may have more than one epitope. Thus, different antibodies may bind to different areas on an antigen and may have different biological effects. The term “epitope” also refers to a site on an antigen to which B and/or T cells respond. It also refers to a region of an antigen that is bound by an antibody. Epitopes may be defined as structural or functional. Functional epitopes are generally a subset of the structural epitopes and have those residues that directly contribute to the affinity of the interaction. Epitopes may also be conformational, that is, composed of non-linear amino acids. In certain embodiments, epitopes may include determinants that are chemically active surface groupings of molecules such as amino acids, sugar side chains, phosphoryl groups, or sulfonyl groups, and, in certain embodiments, may have specific three-dimensional structural characteristics, and/or specific charge characteristics.

[0126] The terms “substantial identity” and “substantially identical” are used interchangeably herein and, when referring to a nucleic acid or fragment thereof, indicates that, when optimally aligned with appropriate nucleotide insertions or deletions with another nucleic acid (or its complementary strand), there is nucleotide sequence identity in at least about 90%, and more preferably at least about 95%, 96%, 97%, 98%, or 99% of the nucleotide bases, as measured by any well-known algorithm of sequence identity, such as FASTA, BLAST, or GAP, as discussed below. Accordingly, nucleic acid sequences that display a certain percentage identity share that percentage identity and/or are that percentage identical to one another. A nucleic acid molecule having substantial identity to a reference nucleic acid molecule may, in certain instances, encode a polypeptide having the same or substantially similar amino acid sequence as the polypeptide encoded by the reference nucleic acid molecule.

[0127] In certain embodiments, the disclosed antibody nucleic acid sequences are, e.g., at least 70% identical; at least 75% identical; 80% identical; at least 85% identical; at least 90% identical; at least 95% identical; at least 96% identical; at least 97% identical; at least 98% identical; at least 99%; and/or all percentages of identity in between, to other sequences and/or share such percentage identities with one another (or with certain subsets of the herein-disclosed antibody sequences).

[0128] As applied to polypeptides, the term “substantial identity” or “substantially identical” means that two peptide sequences, when optimally aligned, such as by the programs GAP or BESTFIT using default gap weights, share at least 90% sequence identity, even more preferably at least 95%, 96%, 97%, 98%, or 99% sequence identity. Accordingly, amino acid sequences that display a certain percentage identity share that percentage identity and/or are that percentage identical to one another. Accordingly, amino acid sequences that display a certain percentage identity share that percentage identity and/or are that percentage identical to one another.

[0129] In certain embodiments, the disclosed antibody amino acid sequences are, e.g., at least 70% identical; at least 75% identical; 80% identical; at least 85% identical; at least 90% identical; at least 95% identical; at least 96% identical; at least 97% identical; at least 98% identical; at least 99%; and/or all percentages of identity in between, to other sequences and/or share such percentage identities with one another (or with certain subsets of the herein-disclosed antibody sequences).

[0130] Preferably, residue positions, which are not identical, differ by conservative amino acid substitutions. A “conservative amino acid substitution” is one in which an amino acid residue is substituted by another amino acid residue having a side chain (R group) with similar chemical properties (e.g., charge or hydrophobicity). In general, a conservative amino acid substitution will not substantially change the functional properties of a protein. In cases where two or more amino acid sequences differ from each other by conservative substitutions, the percent or degree of similarity may be adjusted upwards to correct for the conservative nature of the substitution. Means for making this adjustment are well known to those of skill in the art. (See, e.g., Pearson (1994) Methods Mol. Biol. 24: 307-331). Examples of groups of amino acids that have side chains with similar chemical properties include: 1) aliphatic side chains: glycine, alanine, valine, leucine and isoleucine; 2) aliphatic-hydroxyl side chains: serine and threonine; 3) amide-containing side chains: asparagine and glutamine; 4) aromatic side chains: phenylalanine, tyrosine, and tryptophan; 5) basic side chains: lysine, arginine, and histidine; 6) acidic side chains: aspartate and glutamate, and 7) sulfur-containing side chains: cysteine and methionine. Preferred conservative amino acids substitution groups are: valine-leucine-isoleucine, phenylalanine-tyrosine, lysine-arginine, alanine-valine, glutamate-aspartate, and asparagine-glutamine. Alternatively, a conservative replacement is any change having a positive value in the PAM250 log-likelihood matrix disclosed in Gonnet et al. (1992) Science 256: 1443 45. A “moderately conservative” replacement is any change having a non-negative value in the PAM250 log-likelihood matrix.

[0131] Sequence similarity for polypeptides is typically measured using sequence analysis software. Protein analysis software matches similar sequences using measures of similarity assigned to various substitutions, deletions and other modifications, including conservative amino acid substitutions. For instance, GCG software contains programs such as GAP and BESTFIT which can be used with default parameters to determine sequence homology or sequence identity between closely related polypeptides, such as homologous polypeptides from different species of organisms or between a wild type protein and a mutein thereof. See, e.g., GCG Version 6.1. Polypeptide sequences also can be compared using FASTA with default or recommended parameters; a program in GCG Version 6.1. FASTA (e.g., FASTA2 and FASTA3) provides alignments and percent sequence identity of the regions of the best overlap between the query and search sequences (Pearson (2000) supra). Another preferred algorithm when comparing a sequence of the invention to a database containing a large number of sequences from different organisms is the computer program BLAST, especially BLASTP or TBLASTN, using default parameters. (See, e.g., Altschul et al. (1990) J. Mol. Biol. 215: 403 410 and (1997) Nucleic Acids Res. 25:3389 402).

[0132] The phrase “therapeutically effective amount” refers to an amount of a therapeutic agent (e.g., an anti-RSV F antibody disclosed herein) that, when used alone or in combination with another therapeutic agent, protects a subject against the onset of a disease or promotes disease regression evidenced by a decrease in severity of disease symptoms, an increase in frequency and duration of disease symptom-free periods, or a prevention of impairment or disability due to the disease affliction. The ability of a therapeutic agent to promote disease regression can be evaluated using a variety of methods known to the skilled practitioner, such as in human subjects during clinical trials, in animal model systems predictive of efficacy in humans, or by assaying the activity of the agent in in vitro assays. The exact amount will depend on the purpose of the treatment, and will be ascertainable by one skilled in the art using known techniques (see, for example, Lloyd (1999) The Art, Science and Technology of Pharmaceutical Compounding).

[0133] The term “immunogenic composition” refers to a composition containing an antigen/immunogen, e.g., a microorganism (such as a virus or a bacterium) or a component thereof, a protein, a polypeptide, a fragment of a protein or polypeptide, a whole cell inactivated, subunit or attenuated virus, a polysaccharide, or combination thereof, that is administered to stimulate the recipient's humoral and/or cellular immune systems to one or more of the antigens/immunogens present in the immunogenic composition. The immunogenic compositions of the present invention can be used to treat a human susceptible to RSV infection, or suspected of having or being susceptible to RSV infection, by means of administering the immunogenic compositions via a systemic route. These administrations can include injection via the intramuscular (i.m.), intradermal (i.d.), intranasal, inhalation, or subcutaneous (s.c.) routes; application by a patch or other transdermal delivery device. In one embodiment, the immunogenic composition may be used in the manufacture of a vaccine or in the elicitation of polyclonal or monoclonal antibodies that could be used to passively protect or treat a subject.

[0134] The terms “vaccine” or “vaccine composition”, which are used interchangeably, refer to a composition comprising at least one immunogenic composition that induces an immune response in a subject (e.g., a mammal, e.g., a human).

[0135] In certain embodiments, a protein of interest comprises an antigen. The terms “antigen,” “immunogen,” “antigenic,” “immunogenic,” “antigenically active,” and “immunologically active”, when made in reference to a molecule, refer to any substance that is capable of inducing a specific humoral and/or cell-mediated immune response. In one embodiment, the antigen comprises an epitope.

[0136] “Immunologically protective amount”, as used herein, is an amount of an antigen effective to induce an immunogenic response in the recipient that is adequate to prevent or ameliorate signs or symptoms of disease, including adverse health effects or complications thereof. Either humoral immunity or cell-mediated immunity or both can be induced. The immunogenic response of an animal to a composition can be evaluated, e.g., indirectly through measurement of antibody titers, lymphocyte proliferation assays, or directly through monitoring signs and symptoms after challenge with the microorganism. The protective immunity conferred by an immunogenic composition or vaccine can be evaluated by measuring, e.g., reduction of shed of challenge organisms, reduction in clinical signs such as mortality, morbidity, temperature, and overall physical condition, health and performance of the subject. The immune response can comprise, without limitation, induction of cellular and/or humoral immunity. The amount of a composition or vaccine that is therapeutically effective can vary, depending on the particular organism used, or the condition of the animal being treated or vaccinated.

[0137] The terms “immune response” or “immunological response”, as used herein, refer to the development of a humoral immune response, a cellular-immune response, or a humoral and a cellular immune response to an antigen/immunogen. A “humoral immune response” refers to one that is, at least in part, mediated by antibodies. A “cellular immune response” is one mediated by T-lymphocytes and/or other white blood cells and includes the production of cytokines, chemokines, and similar molecules produced by activated T-cells and/or white blood cells. Immune responses can be determined using standard immunoassays and neutralization assays, which are known in the art.

[0138] The term “immunogenicity”, as used herein, refers to the capability of a protein or polypeptide to elicit an immune response directed specifically against a bacteria or virus that causes the identified disease.

### Preparation of Human Antibodies

[0139] As disclosed herein, anti-RSV F infant antibodies may be obtained through B cell sorting techniques available to the artisan as well as those methods exemplified in the EXAMPLES below. Methods for generating human antibodies in transgenic mice are also known in the art and may also be employed to derive antibodies in accordance with the present disclsosure. Any such known methods can be used in the context of the present invention to make human antibodies that specifically bind to RSV F (see, for example, U.S. Pat. No. 6,596,541).

[0140] The antibodies of the instant invention can possess affinities (K_{D}) ranging from about 1.0×10⁷ M to about 1.0×10¹²M, when measured by binding to antigen either immobilized on solid phase or in solution phase. In some embodiments, the antibodies of the invention possess affinities (K_{D}) ranging from about 1×10⁻⁷M to about 1 ×10⁻¹⁰ M, when measured by binding to antigen either immobilized on solid phase or in solution phase. In other embodiments, the antibodies of the invention possess a K_{D} of less than 50 nM, 25 nM, 10 nM, 5 nM, 1 nM, 0.5 nM, or 0.1 nM, as measured by surface plasmon resonance.

[0141] The anti-RSV F antibodies and antibody fragments of the instant invention encompass proteins having amino acid sequences that may vary from the sequences of the described antibodies but, nonetheless, retain the ability to bind (and, in some cases, neutralize) RSV F. Such variant antibodies and antibody fragments comprise one or more additions, deletions, or substitutions of amino acids when compared to a parent sequence (i.e., amino acid sequence of a described antibody), but exhibit biological activity that is essentially equivalent to that of the described antibodies. Likewise, the antibody-encoding DNA sequences of the present invention encompass sequences that comprise one or more additions, deletions, or substitutions of nucleotides when compared to the disclosed sequence, but that encode an antibody or antibody fragment that is essentially bioequivalent to an antibody or antibody fragment described herein.

[0142] Two antigen-binding proteins (e.g., antibodies) are considered bioequivalent if, for example, they are pharmaceutical equivalents or pharmaceutical alternatives whose rate and extent of absorption do not show a significant difference when administered at the same molar dose under similar experimental conditions, either single does or multiple dose. Some antibodies will be considered equivalents or pharmaceutical alternatives if they are equivalent in the extent of their absorption but not in their rate of absorption and yet may be considered bioequivalent because such differences in the rate of absorption are intentional and are reflected in the labeling, are not essential to the attainment of effective body drug concentrations on, e.g., chronic use, and are considered medically insignificant for the particular drug product studied.

[0143] In one embodiment, two antigen-binding proteins (e.g., antibodies) are bioequivalent if there are no clinically meaningful differences in their safety, purity, and/or potency.

[0144] In another embodiment, two antigen-binding proteins (e.g., antibodies) are bioequivalent if a patient can be switched one or more times between the proteins (e.g., antibodies) without an expected increase in the risk of adverse effects, including a clinically significant change in immunogenicity, or diminished effectiveness, as compared to continued therapy without such switching.

[0145] In yet another embodiment, two antigen-binding proteins (e.g., antibodies) are bioequivalent if both proteins (e.g., antibodies) act by a common mechanism or mechanisms of action for the condition or conditions of use, to the extent that such mechanisms are known.

[0146] Bioequivalence may be demonstrated by in vivo and/or in vitro methods. Bioequivalence measures include, e.g., (a) an in vivo test in humans or other mammals, in which the concentration of the antibody or its metabolites is measured in blood, plasma, serum, or other biological fluid as a function of time; (b) an in vitro test that has been correlated with and is reasonably predictive of human in vivo bioavailability data; (c) an in vivo test in humans or other mammals in which the appropriate acute pharmacological effect of the antibody (or its target) is measured as a function of time; and (d) a well-controlled clinical trial that establishes safety, efficacy, bioavailability, and/or bioequivalence of an antibody.

[0147] Bioequivalent variants of the antibodies of the invention may be constructed by, for example, making various substitutions of residues or sequences or deleting terminal or internal residues or sequences (which may occur in the variable or binding regions as well as framework regions) not needed for biological activity. In some embodiments, it is contemplated that the anti-RSV F antibodies may contain inter alia one or more additional amino acid residue substitutions, mutations and/or modifications in the constant region (i.e., the Fc region) which result in preferred characteristics including, but not limited to: altered pharmacokinetics, increased serum half life, increase binding affinity, reduced immunogenicity, increased production, altered Fc ligand binding to an Fc receptor (FcR), enhanced or reduced ADCC (antibody-dependent cell mediated cytotoxicity) or CDC (complement-dependent cytotoxicity) activity, altered glycosylation and/or disulfide bonds and modified binding specificity. In this regard it will be appreciated that these Fc variants may advantageously be used to enhance the effective anti-neoplastic properties of the disclosed modulators. For example, cysteine residues not essential for biological activity can be deleted or replaced with other amino acids to prevent formation of unnecessary or incorrect intramolecular disulfide bridges upon renaturation. In other contexts, bioequivalent antibodies may include antibody variants comprising amino acid changes that modify the glycosylation characteristics of the antibodies, e.g., mutations that eliminate or remove glycosylation. In still other contexts, bioequivalent antibodies may include antibody variants comprising amino acid changes that modify the Fc region. Such Fc variant may have increased half-life, improved stability, and/or modified effector function(s).

[0148] Biological and Biophysical Characteristics of the Antibodies

[0149] In certain embodiments, the antibodies and antigen-binding fragments thereof specifically bind to RSV F, wherein at least one of the CDRH1, CDRH2, CDRH3, CDRL1, CDRL2, and/or CDRL3 amino acid sequences of such antibody or the antigen-binding fragment thereof is at least 70% identical; at least 75% identical; 80% identical; at least 85% identical; at least 90% identical; at least 95% identical; at least 96% identical; at least 97% identical; at least 98% identical; at least 99%; and/or all percentages of identity in between, to at least one of the CDRH1, a CDRH2, a CDRH3, a CDRL1, a CDRL2, and/or a CDRL3 amino acid sequence of an antibody selected from Antibody Number 1 through Antibody Number 947 as disclosed in Table 5.

[0150] Without wishing to be bound by any theory, it is believed that the inventive antibodies and antigen-binding fragments thereof may function by binding to RSV F, preferably in the PreF conformation, and in so doing act to block the fusion of the viral membrane with the host cell membrane. The antibodies of the present invention may also function by binding to RSV F and in so doing block the cell to cell spread of the virus and block syncytia formation associated with RSV infection of cells. Subtype A is responsible for the majority of hospitalizations for RSV and RSV-related complications. Advantageously, RSV subtype A or both RSV subtype A and RSV subtype B are effectively blocked, or neutralized, by the majority of the anti-RSV antibodies disclosed herein.

[0151] In certain embodiments, the inventive antibodies and antigen-binding fragment thereof display better binding affinity for the prefusion (PreF) form of RSV F relative to the postfusion (PostF) form of RSV F. Indeed, in some embodiments, the anti-RSV F antibodies disclosed herein bind to PreF (e.g., with high affinity) but do not bind to PostF or bind to PostF with low affinity. In other embodiments, the antibodies and antigen-binding fragments thereof disclosed herein display better binding affinity for PostF than PreF.

[0152] Antibodies with a range of polyreactivity (high, medium, low, or undetectable) are disclosed. In some embodiments, the inventive antibodies and antigen-binding fragments thereof advantageously display a clean or low polyreactivity profile (see, e.g., WO 2014/179363 and Xu et al., Protein Eng Des Sel, October; 26(10):663-70. doi: 10.1093/protein/gzt047), and are thus particularly amenable to development as safe, efficacious, and developable therapeutic and/or prophylactic anti-RSV treatments.

[0153] In certain embodiments, the inventive antibodies and antigen-binding fragments thereof, without wishing to be bound by any theory, may function by blocking or inhibiting RSV fusion to the cell membrane by binding to any one or more of antigenic Sites Ø, I, II, III, IV, and/or Site V of the F protein. In certain embodiments, the antibodies disclosed herein display antigenic site specificity for Site III of (preF) RSV F and, generally, such antibodies are neutralizing antibodies (in some instances, e.g., ADI-19425, potently neutralizing). In other embodiments, the antibodies disclosed herein display antigenic site specificity for Site I of (postF) RSV F and, generally, such antibodies are non-neutralizing antibodies.

[0154] In certain embodiments, at least a portion of the epitope with which the inventive antibodies and antigen-binding fragments thereof interacts comprises the loop connecting α6 to α7 of PreF and/or (36 of PreF. In certain embodiments, the heavy chain (e.g., CDRL3) and the light chain (e.g., CDRH2) of the inventive antibodies interact with the epitope of PreF. In a particular embodiment, Tyr33 in CDRL1 and Tyr93 in CDRL3 both contact the α6-α7 loop of RSV preF and/or five consecutive serine residues, preferably followed by a tyrosine residue (Tyr56), in CDRH2 form a network of hydrogen bonds with Asp310 on β6 of RSV preF. In still further embodiments, the CDRH3 of the inventive antibodies have relatively few sequence (composition and/or length) restrictions.

[0155] In certain embodiments, the inventive antibodies and antigen-binding fragments thereof display an in vitro neutralization potency (IC₅₀) of greater than 0.5 ug/ml (referred to as “weak neutralization potency”); between about 0.5 ug/ml to about 5 ug/ml (referred to as “low neutralization potency”); between about 0.05 ug/ml to about 0.5 ug/ml (referred to as “medium neutralization potency”); or less than about 0.05 mg/ml (referred to as “high neutralization potency”). Neutralization potency can be measured using standard assays well known in the field, including, but not limited to, a high-throughput fluorescence plate reader neutralization assay (as described herein, see EXAMPLES).

[0156] In certain embodiments, the inventive antibodies and antigen-binding fragments thereof display at least about 2-fold; at least about 3-fold; at least about 4-fold; at least about 5-fold; at least about 6-fold; at least about 7-fold; at least about 8-fold; at least about 9-fold; at least about 10-fold; at least about 15-fold; at least about 20-fold; at least about 25-fold; at least about 30-fold; at least about 35-fold; at least about 40-fold; at least about 50-fold; at least about 55-fold; at least about 60-fold; at least about 70-fold; at least about 80-fold; at least about 90-fold; at least about 100-fold; greater than about 100-fold; and folds in between any of the foregoing; greater neutralization potency (IC₅₀) than motavizumab, MPEG, and D25.

[0157] In certain embodiments, the inventive antibodies and antigen-binding fragments thereof comprise the CDRH3 amino acid sequence of any one of the antibodies designated Antibody Number 1 through Antibody Number 947 as disclosed in Table 5.

[0158] In certain embodiments, the inventive antibodies and antigen-binding fragments thereof comprise the CDRH2 amino acid sequence of any one of the antibodies designated Antibody Number 1 through Antibody Number 947 as disclosed in Table 5.

[0159] In certain embodiments, the inventive antibodies and antigen-binding fragments thereof comprise the CDRH1 amino acid sequence of any one of the antibodies designated Antibody Number 1 through Antibody Number 947 as disclosed in Table 5.

[0160] In certain embodiments, the inventive antibodies and antigen-binding fragments thereof comprise the CDRL3 amino acid sequence of any one of the antibodies designated Antibody Number 1 through Antibody Number 947 as disclosed in Table 5.

[0161] In certain embodiments, the inventive antibodies and antigen-binding fragments thereof comprise the CDRL2 amino acid sequence of any one of the antibodies designated Antibody Number 1 through Antibody Number 947 as disclosed in Table 5.

[0162] In certain embodiments, the inventive antibodies and antigen-binding fragments thereof comprise the CDRL1 amino acid sequence of any one of the antibodies designated Antibody Number 1 through Antibody Number 947 as disclosed in Table 5.

[0163] In certain embodiments, the inventive antibodies and antigen-binding fragments thereof comprise any combination of two or more of the CDRH3, CDRH2, CDRH1, CDRL3, CDRL2, and CDRL1 amino acid sequences of any one of the antibodies designated Antibody Number 1 through Antibody Number 947 as disclosed in Table 5. By way of example only, the inventive antibodies and antigen-binding fragments thereof comprise the CDRL3 and the CDRH2 of any one of the antibodies designated Antibody Number 1 through Antibody Number 947 as disclosed in Table 5.

[0164] In certain embodiments, the inventive antibodies and antigen-binding fragments thereof comprise a heavy chain (HC) amino acid sequence of any one of the antibodies designated Antibody Number 1 through Antibody Number 947 as disclosed in Table 5. In certain embodiments, the inventive antibodies and antigen-binding fragments thereof comprise a light chain (LC) amino acid sequence of any one of the antibodies designated Antibody Number 1 through Antibody Number 947 as disclosed in Table 5. In certain embodiments, the inventive antibodies and antigen-binding fragments thereof comprise a heavy chain (HC) amino acid sequence and a light chain (LC) amino acid sequence of any one of the antibodies designated Antibody Number 1 through Antibody Number 947 as disclosed in Table 5.

[0165] In certain embodiments, the inventive antibodies and antigen-binding fragments thereof are each selected from the group consisting antibodies that are at least 70% identical; at least 75% identical; 80% identical; at least 85% identical; at least 90% identical; at least 95% identical; at least 96% identical; at least 97% identical; at least 98% identical; at least 99%; and/or all percentages of identity in between; to any one of the antibodies designated as Antibody Number 1 through Antibody Number 947 as disclosed in Table 5.

[0166] In certain embodiments, the inventive antibodies and antigen-binding fragments thereof comprise are each selected from the group consisting of the antibodies designated as Antibody Number 1 through Antibody Number 947 as disclosed in Table 5.

[0167] In certain embodiments, isolated nucleic acid sequences are provided that encode antibodies (or antigen-binding fragments thereof) that specifically bind to RSV F, wherein at least one of the CDRH1, CDRH2, CDRH3, CDRL1, CDRL2, and/or CDRL3 amino acid sequences of the antibody or the antigen-binding fragment thereof is at least 70% identical; at least 75% identical; 80% identical; at least 85% identical; at least 90% identical; at least 95% identical; at least 96% identical; at least 97% identical; at least 98% identical; at least 99%; and/or all percentages of identity in between; to at least one of the CDRH1, CDRH2, CDRH3, CDRL1, CDRL2, and/or CDRL3 amino acid sequences of an antibody selected from Antibody Number 1 through Antibody Number 947 as disclosed in Table 5. In certain embodiments, such nucleic acid sequences are selected from those nucleic acid sequences that are disclosed in Table 5 and compliments thereof.

[0168] In certain embodiments, isolated nucleic acid sequences are provided that encode the inventive antibodies and antigen-binding fragments thereof, wherein such nucleic acid sequences comprise sequences that encode the CDRH3 amino acid sequence of the antibodies designated Antibody Number 1 through Antibody Number 947 as disclosed in Table 5. In certain embodiments, such nucleic acid sequences are selected from those nucleic acid sequences that are disclosed in Table 5 and compliments thereof.

[0169] In certain embodiments, isolated nucleic acid sequences are provided that encode the inventive antibodies and antigen-binding fragments thereof, wherein such nucleic acid sequences comprise sequences that encode the CDRH2 amino acid sequences of the antibodies designated Antibody Number 1 through Antibody Number 947 as disclosed in Table 5. In certain embodiments, such nucleic acid sequences are selected from those nucleic acid sequences that are disclosed in Table 5 and compliments thereof.

[0170] In certain embodiments, isolated nucleic acid sequences are provided that encode the inventive antibodies and antigen-binding fragments thereof, wherein such nucleic acid sequences comprise sequences that encode the CDRH1 amino acid sequences of the antibodies designated Antibody Number 1 through Antibody Number 947 as disclosed in Table 5. In certain embodiments, such nucleic acid sequences are selected from those nucleic acid sequences that are disclosed in Table 5 and compliments thereof.

[0171] In certain embodiments, isolated nucleic acid sequences are provided that encode the inventive antibodies and antigen-binding fragments thereof, wherein such nucleic acid sequences comprise sequences that encode the CDRL3 amino acid sequences of the antibodies designated Antibody Number 1 through Antibody Number 947 as disclosed in Table 5. In certain embodiments, such nucleic acid sequences are selected from those nucleic acid sequences that are disclosed in Table 5 and compliments thereof.

[0172] In certain embodiments, isolated nucleic acid sequences are provided that encode the inventive antibodies and antigen-binding fragments thereof, wherein such nucleic acid sequences comprise sequences that encode the CDRL2 amino acid sequences of the antibodies designated Antibody Number 1 through Antibody Number 947 as disclosed in Table 5. In certain embodiments, such nucleic acid sequences are selected from those nucleic acid sequences that are disclosed in Table 5 and compliments thereof.

[0173] In certain embodiments, isolated nucleic acid sequences are provided that encode the inventive antibodies and antigen-binding fragments thereof, wherein such nucleic acid sequences comprise sequences that encode the CDRL1 amino acid sequences of the antibodies designated Antibody Number 1 through Antibody Number 947 as disclosed in Table 5. In certain embodiments, such nucleic acid sequences are selected from those nucleic acid sequences that are disclosed in Table 5 and compliments thereof.

[0174] In certain embodiments, isolated nucleic acid sequences are provided that encode the inventive antibodies and antigen-binding fragments thereof, wherein such nucleic acid sequences comprise sequences that encode the heavy chain (HC) amino acid sequences of the antibodies designated Antibody Number 1 through Antibody Number 947 as disclosed in Table 5. In certain embodiments, such nucleic acid sequences are selected from those nucleic acid sequences that are disclosed in Table 5 and compliments thereof.

[0175] In certain embodiments, isolated nucleic acid sequences are provided that encode the inventive antibodies and antigen-binding fragments thereof, wherein such nucleic acid sequences comprise sequences that encode the light chain (LC) amino acid sequences of the antibodies designated Antibody Number 1 through Antibody Number 947 as disclosed in Table 5. In certain embodiments, such nucleic acid sequences are selected from those nucleic acid sequences that are disclosed in Table 5 and compliments thereof.

[0176] In certain embodiments, isolated nucleic acid sequences are provided that encode the inventive antibodies and antigen-binding fragments thereof, wherein such nucleic acid sequences comprise sequences that are each selected from the group consisting of sequences that are at least 70% identical; at least 75% identical; 80% identical; at least 85% identical; at least 90% identical; at least 95% identical; at least 96% identical; at least 97% identical; at least 98% identical; at least 99%; and/or all percentages of identity in between; to any one of the nucleic acid sequences that are disclosed in Table 5 and compliments thereof.

[0177] In certain embodiments, isolated nucleic acid sequences are provided that encode the inventive antibodies and antigen-binding fragments thereof, wherein such nucleic acid sequences comprise sequences selected from the nucleic acid sequences that are disclosed in Table 5 and compliments thereof.

[0178] In certain embodiments, expression vectors are provided comprising the isolated nucleic acid sequences disclosed herein. In some embodiments, a single expression vector comprises the isolated nucleic acid sequences (e.g., V_{H} and V_{L}, or HC and LC, are contained in the same vector). In this case, host cells are transfected, transformed, or transduced with a single expression vector. However, in other embodiments, more than one expression vector comprises the isolated nucleic acid sequences (e.g., V_{H} and V_{L}, or HC and LC, are each contained in a different vector). In this case, host cells are transfected, transformed, or transduced with more than one expression vector.

[0179] Host cells transfected, transformed, or transduced with the nucleic acid sequences and/or the expression vectors themselves are also encompassed by the subject invention.

### Epitope Mapping and Related Technologies

[0180] As described above and as demonstrated in the EXAMPLES, Applicant has characterized inter alia the epitope binding of the inventive antibodies and antigen-binding fragments thereof. In addition to the methods utilized by Applicant, various other techniques are available to the skilled artisan that can be used to carry out such characterization or to otherwise ascertain whether an antibody “interacts with one or more amino acids” within a polypeptide or protein. Exemplary techniques include, for example, a routine cross-blocking assay such as that described Antibodies, Harlow and Lane (Cold Spring Harbor Press, Cold Spring Harb., N.Y.) can be performed. Other methods include alanine scanning mutational analysis, peptide blot analysis (Reineke (2004) Methods Mol Biol 248:443-63), peptide cleavage analysis crystallographic studies and NMR analysis. In addition, methods such as epitope excision, epitope extraction and chemical modification of antigens can be employed (Tomer (2000) Protein Science 9: 487-496). Another method that can be used to identify the amino acids within a polypeptide with which an antibody interacts is hydrogen/deuterium exchange detected by mass spectrometry. In general terms, the hydrogen/deuterium exchange method involves deuterium-labeling the protein of interest, followed by binding the antibody to the deuterium-labeled protein. Next, the protein/antibody complex is transferred to water and exchangeable protons within amino acids that are protected by the antibody complex undergo deuterium-to-hydrogen back-exchange at a slower rate than exchangeable protons within amino acids that are not part of the interface. As a result, amino acids that form part of the protein/antibody interface may retain deuterium and therefore exhibit relatively higher mass compared to amino acids not included in the interface. After dissociation of the antibody, the target protein is subjected to protease cleavage and mass spectrometry analysis, thereby revealing the deuterium-labeled residues that correspond to the specific amino acids with which the antibody interacts. See, e.g., Ehring (1999) Analytical Biochemistry 267 (2):252-259; Engen and Smith (2001) Anal. Chem. 73:256A-265A.

[0181] As the artisan will understand, an epitope can be formed both from contiguous amino acids or noncontiguous amino acids juxtaposed by tertiary folding of a protein. Epitopes formed from contiguous amino acids are typically retained on exposure to denaturing solvents, whereas epitopes formed by tertiary folding are typically lost on treatment with denaturing solvents. An epitope typically includes at least 3, and more usually, at least 5 or 8-10 amino acids in a unique spatial conformation.

[0182] Modification-Assisted Profiling (MAP), also known as Antigen Structure-based Antibody Profiling (ASAP) is a method that categorizes large numbers of monoclonal antibodies (mAbs) directed against the same antigen according to the similarities of the binding profile of each antibody to chemically or enzymatically modified antigen surfaces (see, e.g., US 2004/0101920). Each category may reflect a unique epitope either distinctly different from or partially overlapping with epitope represented by another category. This technology allows rapid filtering of genetically identical antibodies, such that characterization can be focused on genetically distinct antibodies. When applied to hybridoma screening, MAP may facilitate identification of rare hybridoma clones that produce mAbs having the desired characteristics. MAP may be used to sort the antibodies of the invention into groups of antibodies binding different epitopes.

[0183] As the artisan understands, one can easily determine whether an antibody binds to the same epitope as, or competes for binding with, a reference anti-RSV F antibody by using routine methods available in the art. For example, to determine if a test antibody binds to the same epitope as a reference RSV F antibody of the invention, the reference antibody is allowed to bind to a RSV F protein or peptide under saturating conditions. Next, the ability of a test antibody to bind to the RSV F molecule is assessed. If the test antibody is able to bind to RSV F following saturation binding with the reference anti-RSV F antibody, it can be concluded that the test antibody binds to a different epitope than the reference anti-RSV F antibody. On the other hand, if the test antibody is not able to bind to the RSV F molecule following saturation binding with the reference anti-RSV F antibody, then the test antibody may bind to the same epitope as the epitope bound by the reference anti-RSV F antibody of the invention.

[0184] To determine if an antibody competes for binding with a reference anti-RSV F antibody, the above-described binding methodology is performed in two orientations. In a first orientation, the reference antibody is allowed to bind to a RSV F molecule under saturating conditions followed by assessment of binding of the test antibody to the RSV F molecule. In a second orientation, the test antibody is allowed to bind to a RSV F molecule under saturating conditions followed by assessment of binding of the reference antibody to the RSV F molecule. If, in both orientations, only the first (saturating) antibody is capable of binding to the RSV F molecule, then it is concluded that the test antibody and the reference antibody compete for binding to RSV F. As will be appreciated by a person of ordinary skill in the art, an antibody that competes for binding with a reference antibody may not necessarily bind to the identical epitope as the reference antibody, but may sterically block binding of the reference antibody by binding an overlapping or adjacent epitope.

[0185] Two antibodies bind to the same or overlapping epitope if each competitively inhibits (blocks) binding of the other to the antigen. That is, a 1-, 5-, 10-, 20-, or 100-fold excess of one antibody inhibits binding of the other by at least 50% but preferably 75%, 90% or even 99% as measured in a competitive binding assay (see, e.g., Junghans et al., Cancer Res. (1990) 50:1495-1502). Alternatively, two antibodies have the same epitope if essentially all amino acid mutations in the antigen that reduce or eliminate binding of one antibody reduce or eliminate binding of the other. Two antibodies have overlapping epitopes if some amino acid mutations that reduce or eliminate binding of one antibody reduce or eliminate binding of the other.

[0186] Additional routine experimentation (e.g., peptide mutation and binding analyses) can then be carried out to confirm whether the observed lack of binding of the test antibody is in fact due to binding to the same epitope as the reference antibody or if steric blocking (or another phenomenon) is responsible for the lack of observed binding. Experiments of this sort can be performed using ELISA, RIA, surface plasmon resonance, flow cytometry or any other quantitative or qualitative antibody-binding assay available in the art.

### Immunoconjugates

[0187] The invention encompasses a RSV F antibody conjugated to a therapeutic moiety (“immunoconjugate”), such as an agent that is capable of reducing the severity of primary infection with RSV, or ameliorating at least one symptom associated with RSV infection, including coughing, fever, pneumonia, or the severity thereof. Such an agent may be a second different antibody to RSV F or a vaccine. The type of therapeutic moiety that may be conjugated to the anti-RSV F antibody and will take into account the condition to be treated and the desired therapeutic effect to be achieved. Alternatively, if the desired therapeutic effect is to treat the sequelae or symptoms associated with RSV infection, or any other condition resulting from such infection, such as, but not limited to, pneumonia, it may be advantageous to conjugate an agent appropriate to treat the sequelae or symptoms of the condition, or to alleviate any side effects of the antibodies of the invention. Examples of suitable agents for forming immunoconjugates are known in the art, see for example, WO 05/103081.

### Multi-Specific Antibodies

[0188] The antibodies of the present invention may be mono-specific, bi-specific, or multi-specific. Multi-specific antibodies may be specific for different epitopes of one target polypeptide or may contain antigen-binding domains specific for more than one target polypeptide. See, e.g., Tutt et al., 1991, J. Immunol. 147:60-69; Kufer et al., 2004, Trends Biotechnol. 22:238-244. As discussed above, the antibodies of the present invention can be linked to or co-expressed with another functional molecule, e.g., another peptide or protein. For example, an antibody or fragment thereof can be functionally linked (e.g., by chemical coupling, genetic fusion, noncovalent association or otherwise) to one or more other molecular entities, such as another antibody or antibody fragment to produce a bi-specific or a multi-specific antibody with a second binding specificity.

[0189] An exemplary bi-specific antibody format that can be used in the context of the present invention involves the use of a first immunoglobulin (Ig) C_{H}3 domain and a second Ig C_{H}3 domain, wherein the first and second Ig C_{H}3 domains differ from one another by at least one amino acid, and wherein at least one amino acid difference reduces binding of the bi-specific antibody to Protein A as compared to a bi-specific antibody lacking the amino acid difference. In one embodiment, the first Ig C_{H}3 domain binds Protein A and the second Ig C_{H}3 domain contains a mutation that reduces or abolishes Protein A binding such as an H95R modification (by IMGT exon numbering; H435R by EU numbering). The second C_{H}3 may further comprise a Y96F modification (by IMGT; Y436F by EU). Further modifications that may be found within the second C_{H3} include: D16E, L18M, N44S, K52N, V57M, and V82I (by IMGT; D356E, L358M, N384S, K392N, V397M, and V422I by EU) in the case of lgG1 antibodies; N44S, K52N, and V82I (IMGT; N384S, K392N, and V422I by EU) in the case of lgG2 antibodies; and Q15R, N44S, K52N, V57M, R69K, E79Q, and V82I (by IMGT; Q355R, N384S, K392N, V397M, R409K, E419Q, and V422I by EU) in the case of lgG4 antibodies. Variations on the bi-specific antibody format described above are contemplated within the scope of the present invention.

### Therapeutic Administration and Formulations

[0190] The invention provides therapeutic compositions comprising the inventive anti-RSV F antibodies or antigen-binding fragments thereof. The administration of therapeutic compositions in accordance with the invention will be administered with suitable carriers, excipients, and other agents that are incorporated into formulations to provide improved transfer, delivery, tolerance, and the like. A multitude of appropriate formulations can be found in the formulary known to all pharmaceutical chemists: Remington's Pharmaceutical Sciences, Mack Publishing Company, Easton, Pa. These formulations include, for example, powders, pastes, ointments, jellies, waxes, oils, lipids, lipid (cationic or anionic) containing vesicles (such as LIPOFECTIN™), DNA conjugates, anhydrous absorption pastes, oil-in-water and water-in-oil emulsions, emulsions carbowax (polyethylene glycols of various molecular weights), semi-solid gels, and semi-solid mixtures containing carbowax. See also Powell et al. “Compendium of excipients for parenteral formulations” PDA (1998) J Pharm Sci Technol 52:238-311.

[0191] The dose of each of the antibodies of the invention may vary depending upon the age and the size of a subject to be administered, target disease, conditions, route of administration, and the like. When the antibodies of the present invention are used for treating a RSV infection in a patient, or for treating one or more symptoms associated with a RSV infection infection, such as the cough or pneumonia associated with a RSV infection in a patient, or for lessening the severity of the disease, it is advantageous to administer each of the antibodies of the present invention intravenously or subcutaneously normally at a single dose of about 0.01 to about 30 mg/kg body weight, more preferably about 0.1 to about 20 mg/kg body weight, or about 0.1 to about 15 mg/kg body weight, or about 0.02 to about 7 mg/kg body weight, about 0.03 to about 5 mg/kg body weight, or about 0.05 to about 3 mg/kg body weight, or about 1 mg/kg body weight, or about 3.0 mg/kg body weight, or about 10 mg/kg body weight, or about 20 mg/kg body weight. Multiple doses may be administered as necessary. Depending on the severity of the condition, the frequency and the duration of the treatment can be adjusted. In certain embodiments, the antibodies or antigen-binding fragments thereof of the invention can be administered as an initial dose of at least about 0.1 mg to about 800 mg, about 1 to about 600 mg, about 5 to about 300 mg, or about 10 to about 150 mg, to about 100 mg, or to about 50 mg. In certain embodiments, the initial dose may be followed by administration of a second or a plurality of subsequent doses of the antibodies or antigen-binding fragments thereof in an amount that can be approximately the same or less than that of the initial dose, wherein the subsequent doses are separated by at least 1 day to 3 days; at least one week, at least 2 weeks; at least 3 weeks; at least 4 weeks; at least 5 weeks; at least 6 weeks; at least 7 weeks; at least 8 weeks; at least 9 weeks; at least 10 weeks; at least 12 weeks; or at least 14 weeks.

[0192] Various delivery systems are known and can be used to administer the pharmaceutical composition of the invention, e.g., encapsulation in liposomes, microparticles, microcapsules, recombinant cells capable of expressing the mutant viruses, receptor mediated endocytosis (see, e.g., Wu et al. (1987) J. Biol. Chem. 262:4429-4432). Methods of introduction include, but are not limited to, intradermal, transdermal, intramuscular, intraperitoneal, intravenous, subcutaneous, intranasal, epidural and oral routes. The composition may be administered by any convenient route, for example by infusion or bolus injection, by absorption through epithelial or mucocutaneous linings {e.g., oral mucosa, nasal mucosa, rectal and intestinal mucosa, etc.) and may be administered together with other biologically active agents. Administration can be systemic or local. It may be delivered as an aerosolized formulation (See U.S. Publication No. 2011/0311515 and U.S. Publication No. 2012/0128669). The delivery of agents useful for treating respiratory diseases by inhalation is becoming more widely accepted (See A. J. Bitonti and J. A. Dumont, (2006), Adv. Drug Deliv. Rev, 58:1 106-1 1 18). In addition to being effective at treating local pulmonary disease, such a delivery mechanism may also be useful for systemic delivery of antibodies (See Maillet et al. (2008), Pharmaceutical Research, Vol. 25, No. 6, 2008).

[0193] The pharmaceutical composition can be also delivered in a vesicle, in particular a liposome (see, for example, Langer (1990) Science 249:1527-1533).

[0194] In certain situations, the pharmaceutical composition can be delivered in a controlled release system. In one embodiment, a pump may be used. In another embodiment, polymeric materials can be used. In yet another embodiment, a controlled release system can be placed in proximity of the composition's target, thus requiring only a fraction of the systemic dose.

[0195] The injectable preparations may include dosage forms for intravenous, subcutaneous, intracutaneous and intramuscular injections, drip infusions, etc. These injectable preparations may be prepared by methods publicly known. For example, the injectable preparations may be prepared, e.g., by dissolving, suspending or emulsifying the antibody or its salt described above in a sterile aqueous medium or an oily medium conventionally used for injections. As the aqueous medium for injections, there are, for example, physiological saline, an isotonic solution containing glucose and other auxiliary agents, etc., which may be used in combination with an appropriate solubilizing agent such as an alcohol (e.g., ethanol), a polyalcohol (e.g., propylene glycol, polyethylene glycol), a nonionic surfactant [e.g., polysorbate 80, HCO-50 (polyoxyethylene (50 mol) adduct of hydrogenated castor oil)], etc. As the oily medium, there are employed, e.g., sesame oil, soybean oil, etc., which may be used in combination with a solubilizing agent such as benzyl benzoate, benzyl alcohol, etc. The injection thus prepared is preferably filled in an appropriate ampoule.

[0196] A pharmaceutical composition of the present invention can be delivered subcutaneously or intravenously with a standard needle and syringe. In addition, with respect to subcutaneous delivery, a pen delivery device readily has applications in delivering a pharmaceutical composition of the present invention. Such a pen delivery device can be reusable or disposable. A reusable pen delivery device generally utilizes a replaceable cartridge that contains a pharmaceutical composition. Once all of the pharmaceutical composition within the cartridge has been administered and the cartridge is empty, the empty cartridge can readily be discarded and replaced with a new cartridge that contains the pharmaceutical composition. The pen delivery device can then be reused. In a disposable pen delivery device, there is no replaceable cartridge. Rather, the disposable pen delivery device comes prefilled with the pharmaceutical composition held in a reservoir within the device. Once the reservoir is emptied of the pharmaceutical composition, the entire device is discarded.

[0197] Numerous reusable pen and autoinjector delivery devices have applications in the subcutaneous delivery of a pharmaceutical composition of the present invention. Examples include, but certainly are not limited to AUTOPEN™ (Owen Mumford, Inc., Woodstock, UK), DISETRONIC™ pen (Disetronic Medical Systems, Burghdorf, Switzerland), HUMALOG MIX 75/25™ pen, HUIIVIALOG™ pen, HUMALIN 70/30™ pen (Eli Lilly and Co., Indianapolis, Ind.), NOVOPEN™ I, II and III (Novo Nordisk, Copenhagen, Denmark), NOVOPEN JUNIOR™ (Novo Nordisk, Copenhagen, Denmark), BD™ pen (Becton Dickinson, Franklin Lakes, N.J.), OPTIPEN™, OPTIPEN PRO™ OPTIPEN STARLET™, and OPTICLIK™ (sanofi-aventis, Frankfurt, Germany), to name only a few. Examples of disposable pen delivery devices having applications in subcutaneous delivery of a pharmaceutical composition of the present invention include, but certainly are not limited to the SOLOSTAR™ pen (sanofi-aventis), the FLEXPEN™ (Novo Nordisk), and the KWIKPEN™ (Eli Lilly), the SURECLICK™ Autoinjector (Amgen, Thousands Oaks, Calif.), the PENLET™ (Haselmeier, Stuttgart, Germany), the EPIPEN (Dey, L.P.) and the HUMIRA™ Pen (Abbott Labs, Abbott Park, Ill.), to name only a few.

[0198] Advantageously, the pharmaceutical compositions for oral or parenteral use described above are prepared into dosage forms in a unit dose suited to fit a dose of the active ingredients. Such dosage forms in a unit dose include, for example, tablets, pills, capsules, injections (ampoules), suppositories, etc. The amount of the aforesaid antibody contained is generally about 5 to about 500 mg per dosage form in a unit dose; especially in the form of injection, it is preferred that the aforesaid antibody is contained in about 5 to about 100 mg and in about 10 to about 250 mg for the other dosage forms.

### Administration Regimens

[0199] According to certain embodiments, multiple doses of an antibody to RSV F may be administered to a subject over a defined time course. The methods according to this aspect of the invention comprise sequentially administering to a subject multiple doses of an antibody to RSV F. As used herein, “sequentially administering” means that each dose of antibody to RSV F is administered to the subject at a different point in time, e.g., on different days separated by a predetermined interval (e.g., hours, days, weeks or months). The present invention includes methods which comprise sequentially administering to the patient a single initial dose of an antibody to RSV F, followed by one or more secondary doses of the antibody to RSV F and, optionally, followed by one or more tertiary doses of the antibody to RSV F.

[0200] The terms “initial dose,” “secondary doses,” and “tertiary doses,” refer to the temporal sequence of administration of the antibody to RSV F. Thus, the “initial dose” is the dose which is administered at the beginning of the treatment regimen (also referred to as the “baseline dose”); the “secondary doses” are the doses which are administered after the initial dose; and the “tertiary doses” are the doses which are administered after the secondary doses. The initial, secondary, and tertiary doses may all contain the same amount of antibody to RSV F, but generally may differ from one another in terms of frequency of administration. In certain embodiments, however, the amount of antibody to RSV F contained in the initial, secondary and/or tertiary doses vary from one another (e.g., adjusted up or down as appropriate) during the course of treatment. In certain embodiments, two or more (e.g., 2, 3, 4, or 5) doses are administered at the beginning of the treatment regimen as “loading doses” followed by subsequent doses that are administered on a less frequent basis (e.g., “maintenance doses”).

[0201] In one exemplary embodiment of the present invention, each secondary and/or tertiary dose is administered 1 to 26 (e.g., 1, 1½, 2, 2½, 3, 3½, 4, 4½, 5, 51/2, 6, 6½, 7, 7½, 8, 8½, 9, 9½, 10, 10½, 11, 11½, 12, 12½, 13, 13½, 14, 14½, 15, 15½, 16, 16½, 17, 17½, 18, 18½, 19, 19½, 20, 20½, 21, 21½, 22, 22½, 23, 23½, 24, 24½, 25, 25½, 26, 26½, or more) weeks after the immediately preceding dose. The phrase “the immediately preceding dose,” as used herein, means that in a sequence of multiple administrations, the dose of antibody to RSV F, which is administered to a patient prior to the administration of the very next dose in the sequence with no intervening doses.

[0202] The methods according to this aspect of the invention may comprise administering to a patient any number of secondary and/or tertiary doses of an antibody to RSV F. For example, in certain embodiments, only a single secondary dose is administered to the patient. In other embodiments, two or more (e.g., 2, 3, 4, 5, 6, 7, 8, or more) secondary doses are administered to the patient. Likewise, in certain embodiments, only a single tertiary dose is administered to the patient. In other embodiments, two or more (e.g., 2, 3, 4, 5, 6, 7, 8, or more) tertiary doses are administered to the patient.

[0203] In embodiments involving multiple secondary doses, each secondary dose may be administered at the same frequency as the other secondary doses. For example, each secondary dose may be administered to the patient 1 to 2 weeks after the immediately preceding dose. Similarly, in embodiments involving multiple tertiary doses, each tertiary dose may be administered at the same frequency as the other tertiary doses. For example, each tertiary dose may be administered to the patient 2 to 4 weeks after the immediately preceding dose. Alternatively, the frequency at which the secondary and/or tertiary doses are administered to a patient can vary over the course of the treatment regimen. The frequency of administration may also be adjusted during the course of treatment by a physician depending on the needs of the individual patient following clinical examination.

[0204] Accordingly, in certain embodiments are provided pharmaceutical compositions comprising: one or more of the inventive antibodies or antigen-binding fragments thereof disclosed herein and throughout and a pharmaceutically acceptable carrier and/or one or more excipients. In certain other embodiments are provided pharmaceutical compositions comprising: one or more nucleic acid sequences encoding one or more inventive antibodies or antigen-binding fragments thereof; or one or more the expression vectors harbouring such nucleic acid sequences; and a pharmaceutically acceptable carrier and/or one or more excipients.

[0205] Therapeutic Uses of the Antibodies

[0206] Due to their binding to and interaction with RSV F, it is believed that the inventive antibodies and antigen-binding fragments thereof are useful for preventing fusion of the virus with the host cell membrane, preventing cell to cell virus spread, and/or inhibiting syncytia formation. Additionally, a subset of the inventive anti-RSV antibodies and antigen-binding fragments thereof display specificity for RSV (i.e., epitopic specificity) that is unique from the specificity of adult anti-RSV antibodies. Therefore, the inventive antibodies and antigen-binding fragments thereof may be advantageous for preventing and/or treating an RSV infection in an infant. As such, the antibodies of the invention are contemplated for prophylactic use in infant, particularly pre-term infants and full-term infants born during RSV season (late fall to early spring). It is contemplated that the antibodies of the invention may be used alone, or in conjunction with one or more additional agents, for treating or preventing RSV infection or at least one symptom or complication associated with RSV infection. The second or third agents may be delivered concurrently with or separately (before or after) from the antibodies of the invention. The one or more additional agents may be an anti-viral (e.g., ribavirin), an NSAID or other agents to reduce fever or pain, another antibody that specifically binds RSV-F, an agent (e.g. an antibody) that binds to another RSV antigen (e.g., RSV G), a vaccine against RSV, and/or an siRNA specific for an RSV antigen.

[0207] In yet a further embodiment of the invention, the present antibodies are used for the preparation of a pharmaceutical composition for treating patients suffering from a RSV infection. The pharmaceutical composition can reduce the severity of a primary infection with RSV, reduce the duration of the infection, and/or reduce at least one symptom associated with the RSV infection. In a further embodiment, the anti-RSV F antibodies disclosed herein are used as adjunct therapy with any other agent useful for treating an RSV infection, including an antiviral, a toxoid, a vaccine, a second RSV-F antibody, or another antibody specific for an RSV antigen, including an RSV-G antibody, or any other palliative therapy known to those skilled in the art.

[0208] Accordingly, the disclosure provides methods of treating or preventing RSV infection, or at least one symptom associated with RSV infection, comprising administering to a patient in need thereof (or suspected of being in need thereof) one or more of the inventive antibodies or antigen-binding fragments thereof, e.g., one or more of the anti-RSV F antibodies disclosed in Table 5, such that the RSV infection is treated or prevented, or the at least on symptom associated with RSV infection is treated, alleviated, or reduced in severity.

[0209] Other embodiments provide methods of treating or preventing a RSV infection, or at least one symptom associated with RSV infection, comprising administering to a patient in need thereof (or suspected of being in need thereof) a nucleic acid sequence encoding one or more of the inventive antibodies or antigen-binding fragments thereof, such nucleic acid sequenced disclosed in Table 5 and compliments thereof, such that the RSV infection is treated or prevented, or the at least on symptom associated with RSV infection is treated, alleviated, or reduced in severity.

[0210] Additional embodiments provide methods of treating or preventing a RSV infection, or at least one symptom associated with RSV infection, comprising administering to a patient in need thereof (or suspected of being in need thereof) a host cell harboring a nucleic acid sequence or an expression vector comprising such a nucleic acid sequence, wherein such nucleic acid sequences is selected from the group consisting of sequences disclosed in Table 5 and compliments thereof, such that the RSV infection is treated or prevented, or the at least one symptom associated with RSV infection is treated, alleviated, or reduced in severity.

[0211] Further embodiments provide methods of treating or preventing a RSV infection, or at least one symptom associated with RSV infection, comprising administering to a patient in need thereof (or suspected of being in need thereof) a pharmaceutical composition comprising one or more of the inventive antibodies or antigen-binding fragments thereof as disclosed in Table 5, or one or more nucleic acid sequences or an expression vectors comprising such a nucleic acid sequence, wherein such nucleic acid sequences are selected from the group consisting of sequences disclosed in Table 5 and compliments thereof; one or more host cells harboring one or more nucleic acid sequences or an expression vectors comprising suchone or more nucleic acid sequences, wherein such nucleic acid sequences are selected from the group consisting of sequences disclosed in Table 5 and compliments thereof; and a pharmaceutically acceptable carrier and/or one or more excipients, such that the RSV infection is treated or prevented, or the at least on symptom associated with RSV infection is treated, alleviated, or reduced in severity.

[0212] The anti-RSV F antibodies disclosed herein may also be suitable for therapeutic and/or prophylactic use in non-humans, e.g., cattle, swine, sheep, or poultry.

[0213] Combination Therapies

[0214] As noted above, according to certain embodiments, the disclosed methods comprise administering to the subject one or more additional therapeutic agents in combination with an antibody to RSV F. As used herein, the expression “in combination with” means that the additional therapeutic agents are administered before, after, or concurrent with the pharmaceutical composition comprising the anti-RSV F antibody. The term “in combination with” also includes sequential or concomitant administration of the anti-RSV F antibody and a second therapeutic agent.

[0215] For example, when administered “before” the pharmaceutical composition comprising the anti-RSV F antibody, the additional therapeutic agent may be administered about 72 hours, about 60 hours, about 48 hours, about 36 hours, about 24 hours, about 12 hours, about 10 hours, about 8 hours, about 6 hours, about 4 hours, about 2 hours, about 1 hour, about 30 minutes, about 15 minutes or about 10 minutes prior to the administration of the pharmaceutical composition comprising the anti-RSV F antibody. When administered “after” the pharmaceutical composition comprising the anti-RSV-F antibody, the additional therapeutic agent may be administered about 10 minutes, about 15 minutes, about 30 minutes, about 1 hour, about 2 hours, about 4 hours, about 6 hours, about 8 hours, about 10 hours, about 12 hours, about 24 hours, about 36 hours, about 48 hours, about 60 hours or about 72 hours after the administration of the pharmaceutical composition comprising the anti-RSV F antibodies. Administration “concurrent” or with the pharmaceutical composition comprising the anti-RSV F antibody means that the additional therapeutic agent is administered to the subject in a separate dosage form within less than 5 minutes (before, after, or at the same time) of administration of the pharmaceutical composition comprising the anti-RSV F antibody, or administered to the subject as a single combined dosage formulation comprising both the additional therapeutic agent and the anti-RSV F antibody.

[0216] Combination therapies may include an anti-RSV F antibody of the invention and any additional therapeutic agent that may be advantageously combined with an antibody of the invention, or with a biologically active fragment of an antibody of the invention.

[0217] For example, a second or third therapeutic agent may be employed to aid in reducing the viral load in the lungs, such as an antiviral, for example, ribavirin. The antibodies may also be used in conjunction with other therapies, as noted above, including a toxoid, a vaccine specific for RSV, a second antibody specific for RSV F, or an antibody specific for another RSV antigen, such as RSV G.

[0218] Diagnostic Uses of the Antibodies

[0219] The inventive anti-RSV antibodies and antigen-binding fragments thereof may also be used to detect and/or measure RSV in a sample, e.g., for diagnostic purposes. It is envisioned that confirmation of an infection thought to be caused by RSV may be made by measuring the presence of the virus through use of any one or more of the antibodies of the invention. Exemplary diagnostic assays for RSV may comprise, e.g., contacting a sample, obtained from a patient, with an anti-RSV F antibody of the invention, wherein the anti-RSV F antibody is labeled with a detectable label or reporter molecule or used as a capture ligand to selectively isolate the virus containing the F protein from patient samples. Alternatively, an unlabeled anti-RSV F antibody can be used in diagnostic applications in combination with a secondary antibody which is itself detectably labeled. The detectable label or reporter molecule can be a radioisotope, such as ³H, ¹⁴C, ³²P ³⁵S, or ¹²⁵I; a fluorescent or chemiluminescent moiety such as fluorescein isothiocyanate, or rhodamine; or an enzyme such as alkaline phosphatase, β-galactosidase, horseradish peroxidase, or luciferase. Specific exemplary assays that can be used to detect or measure RSV containing the F protein in a sample include enzyme-linked immunosorbent assay (ELISA), radioimmunoassay (MA), and fluorescence-activated cell sorting (FACS).

[0220] Samples that can be used in RSV diagnostic assays according to the present invention include any tissue or fluid sample obtainable from a patient, which contains detectable quantities of RSV F protein, or fragments thereof, under normal or pathological conditions. Generally, levels of RSV F in a particular sample obtained from a healthy patient (e.g., a patient not afflicted with a disease or condition associated with the presence of RSV F) will be measured to initially establish a baseline, or standard, level of the F protein from RSV. This baseline level of RSV F can then be compared against the levels of RSV F measured in samples obtained from individuals suspected of having an RSV infection or symptoms associated with such infection.

### EXAMPLES

### Example 1. Isolation and Characterization of Anti-RSV F-Specific Human Infant Antibodies from Memory B Cells

[0221] Applicant has comprehensively profiled the human infant antibody response to RSV F by isolating and characterizing over 450 RSV F-specific monoclonal antibodies from the memory B cells of RSV-infected infants, and used these antibodies to characterize the infant antibody response as well as develop a framework for the rational design of age-specific RSV vaccines. The antibody responses were highly biased, with half of the antibodies recognizing only two antigenic sites. Antibodies targeting both sites showed convergent sequence features, the molecular determinants of which were revealed by X-ray crystallographic studies. A subset of antibodies targeting one of the sites displayed potent neutralizing activity despite lacking somatic mutations, suggesting suitably designed vaccines may be used to induce such antibodies in young infants.

RSV F-Specific Antibodies Isolated from Young Infants have Low Levels of SHM and Biased VH and VL Germline Gene Usage

[0222] To analyze infant B cell responses to RSV F, blood samples from seven infants that were hospitalized due to complications associated with RSV infection were obtained. Of the seven infants, five were less than three months (<3 mo.) and two were at least six months (≥6 mo.) of age at the time of hospitalization (Table 1). Blood was drawn from seven infants hospitalized with bronchiolitis and confirmed RSV infection.

TABLE 1
Clinical information for infant donors

| | Estimated | | | | | Age at | |
|---|---|---|---|---|---|---|---|
| | gestational | Birth | Hospital | Intensity | | admission | Age at blood |
| ID | age (weeks) | weight (kg) | stay (days) | of care^{a} | Intubation | (months) | draw (months) |
| 2308 | 39 | 3.29 | 5 | R | N | 0.35 | 1.35 |
| 2026 | 37 | 2.41 | 7 | I | N | 0.96 | 2.75 |
| 2301 | 40 | 4.5 | 4 | R | CPAP | 1.48 | 3.00 |
| 2021 | 33 | 2.21 | 15 | I | N | 1.61 | 4.46 |
| 2201 | 39 | 4.39 | 3 | I | N | 2.54 | 12.35 |
| 856 | 32.5 | 2.07 | 3 | I | N | 6.00 | 10.61 |
| 2042 | 38 | 3.29 | 1 | I | Y | 26.64 | 29.57 |

^{a}R, routine; I, intensive, all patients were administered O₂.

[0223] Six out of the seven infants were infected during the first RSV season of their life and were therefore likely experiencing a primary infection. The remaining donor, who was 29.5 months old at the time of blood draw, was also likely experiencing a primary infection because secondary RSV infections generally do not result in hospitalization (Glezen et al., 1986). To assess the magnitude of the B cell response to RSV F, peripheral blood mononuclear cells (PBMCs) were stained with fluorescently labeled tetramers of preF and postF trimers and analyzed by flow cytometry (FIGS. 1A and 1B). The frequency of class-switched B cells that were RSV F-specific was substantially lower in infants <3 mo. compared with infants ≥6 mo. (FIG. 1C). In infants <3 mo., the frequency of RSV F-specific class-switched B cells ranged from 0.05-0.3%, whereas in infants ≥6 mo. the frequency ranged from 1.2-1.6%. To dissect the RSV F-specific B cell response, between 100 and 300 RSV F-reactive B cells from each donor were single-cell sorted and the antibody variable heavy (VH)- and variable light (VL)-chain sequences were rescued by single-cell PCR (Tiller et al., 2008). Due to the low frequency of RSV F-specific class-switched B cells in the five younger infants, all B cells that reacted with RSV F were single-cell sorted (FIG. 2A). For the two infants that were ≥6 mo., only class-switched B cells were sorted (FIG. 2B). Although all B cells that reacted with RSV F were sorted from infants <3 mo., index sorting was performed in order to analyze the B cell surface markers expressed on each sorted cell. This analysis revealed that 14-60% of the RSV F-specific B cells sorted from infants <3 mo. were class-switched and/or CD27⁺, with the remaining B cells lacking classical memory markers (FIG. 2C), suggesting that RSV infection induces more robust B cell responses in infants ≥6 mo. compared with infants <3 mo..

[0224] In total, over 450 cognate VH and VL pairs were cloned and expressed as full-length IgGs in an engineered strain of Saccharomyces cerevisiae (Bornholdt et al., 2016; Swers et al., 2004). As expected, sequence analysis showed that the median level of SHM in class-switched B cells increased as a function of age (FIG. 2D). Also, the majority of antibodies isolated from infants <3 mo. lacked SHM, similar to what was observed previously in postF-reactive B cells (Williams et al., 2009). However, nearly 5% of antibodies isolated from these infants had VH genes containing at least five nucleotide substitutions, consistent with previous studies showing that SHM does occur in young infants, albeit at relatively low frequency (Rechavi et al., 2015; Ridings et al., 1998). The level of SHM in antibodies isolated from the two infants ≥6 mo. was relatively high, with a median of 7 and 13 VH nucleotide substitutions resulting in a median of 6 and 11 amino acid substitutions, respectively (FIG. 2D). Analysis of VH and VL germline gene usage showed that RSV F-reactive infant antibody responses were strongly biased toward either VH3-21/VL1-40 or the highly related VH3-11/VL1-40 gene pairing (FIG. 2E). There was also a more modest preference for the VH1-18/VK2-30, VH1-18/VL3-21, and VH5-51/VL6-57 gene pairs (FIG. 2E). The VH1-18/VK2-30 gene pair was present in 8.5% of RSV F-reactive antibodies isolated from adults and is associated with recognition of site V on prefusion F (Gilman et al., 2016; Mousa et al., 2017). Overall, the results demonstrate that RSV infection induced B cell responses with higher levels of SHM in infants ≥6 mo. compared to <3 mo., and that the responses in both age groups exhibit biased germline gene usage.

A Subset of Infant Antibodies Binds with High Affinity to RSV F and Potently Neutralizes RSV

[0225] To further characterize the infant antibodies, the apparent binding affinity of each antibody for preF and postF was determined. For each of the infants <3 mo., 24-34% of the isolated antibodies bound to preF with an apparent affinity of ≤5 nM, compared with 45% and 91% for the two infants ≥6 mo. (FIG. 3A). Although a total of 40 such antibodies were isolated from the youngest three infants, only two antibodies with ≤5 nM affinity for postF were isolated from the same three infants (FIG. 3B). In addition, for every infant the number of antibodies with ≤5 nM affinity for postF was lower than those with ≤5 nM affinity for preF (FIG. 3B). Consistent with this result, the percentage of preF-specific antibodies ranged from 28-63%, whereas substantially smaller percentages (2-17%) were postF-specific (FIG. 4A). Antibodies recognizing both preF and postF comprised about 19-36% of the antibody responses in the four oldest infants, but less than 10% of the response in the three youngest infants. Collectively, these results suggest that young infants generate a preF-biased antibody response that expands to include recognition of postF by six months of age.

[0226] Next, the antibodies were tested for neutralizing activity using a high-throughput assay. This analysis revealed that 12-49% of the antibodies isolated from each infant showed neutralizing activity, and a subset of antibodies isolated from six out of the seven infants showed highly potent neutralizing activity (IC₅₀s<0.05 μg/ml) (FIG. 3C). Interestingly, nearly 20% of the neutralizing antibodies lacked VH and VL gene mutations (Table 2), suggesting that extensive affinity maturation is not required for potent neutralization of RSV. The name, donor ID number, sequence information, binding affinity, neutralization IC₅₀, epitope and index sort information for each antibody is shown in the table.

TABLE 2
Summary of antibody characteristics

| | | Prefusion | Postfusion | Prefusion | Postfusion | Neut IC₅₀ | Neut IC₅₀ |
|---|---|---|---|---|---|---|---|
| | | subtype A | subtype A | subtype B | subtype B | (ug/ml) | (ug/ml) |
| Name | Donor | K_{d} (M)* | K_{d} (M)* | K_{d} (M)* | K_{d} (M)* | subtype A* | subtype B* |
| ADI-25462 | Infant 2308 | 6.42E−10 | N.B. | 1.71E−09 | N.B. | 0.15 | 0.11 |
| ADI-25467 | Infant 2308 | N.B. | 2.53E−08 | N.B. | 2.62E−08 | N.N. | N.N. |
| ADI-25468 | Infant 2308 | 2.89E−08 | N.B. | N.B. | N.B. | N.N. | N.N. |
| ADI-25472 | Infant 2308 | 1.19E−08 | N.B. | 3.77E−08 | N.B. | N.N. | N.N. |
| ADI-25478 | Infant 2308 | 2.43E−09 | N.B. | 6.43E−09 | N.B. | 2.18 | 3.52 |
| ADI-25479 | Infant 2308 | 1.57E−09 | N.B. | 4.29E−09 | N.B. | 0.24 | 0.29 |
| ADI-25480 | Infant 2308 | 1.27E−09 | N.B. | 4.27E−09 | N.B. | 0.17 | 0.17 |
| ADI-25484 | Infant 2308 | 3.79E−09 | N.B. | 1.84E−08 | N.B. | 15.28 | 8.58 |
| ADI-25491 | Infant 2308 | 3.74E−08 | P.F. | 2.19E−08 | N.B. | N.N. | N.N. |
| ADI-25495 | Infant 2308 | 8.70E−10 | N.B. | 6.41E−09 | N.B. | 0.24 | 5.60 |
| ADI-25496 | Infant 2308 | 2.08E−08 | N.B. | N.B. | N.B. | N.N. | N.N. |
| ADI-25497 | Infant 2308 | 5.00E−08 | 1.84E−08 | 1.41E−08 | 1.48E−08 | N.N. | N.N. |
| ADI-25502 | Infant 2308 | 2.93E−08 | P.F. | N.B. | N.B. | N.N. | N.N. |
| ADI-25503 | Infant 2308 | 7.02E−09 | N.B. | N.B. | N.B. | N.N. | N.N. |
| ADI-25505 | Infant 2308 | P.F. | N.B. | N.B. | N.B. | N.N. | N.N. |
| ADI-25514 | Infant 2308 | 4.45E−09 | N.B. | N.B. | N.B. | N.N. | N.N. |
| ADI-25517 | Infant 2308 | N.B. | P.F. | N.B. | N.B. | N.N. | N.N. |
| ADI-25518 | Infant 2308 | 5.57E−08 | P.F. | 3.95E−08 | N.B. | N.N. | N.N. |
| ADI-25524 | Infant 2308 | 8.38E−09 | N.B. | 2.34E−08 | N.B. | 1.77 | 2.09 |
| ADI-25532 | Infant 2308 | 5.87E−10 | N.B. | 1.56E−09 | N.B. | 0.04 | 0.05 |
| ADI-25533 | Infant 2308 | N.B. | P.F. | N.B. | N.B. | N.N. | N.N. |
| ADI-25542 | Infant 2308 | 9.05E−09 | N.B. | N.B. | N.B. | N.N. | N.N. |
| ADI-25547 | Infant 2308 | N.B. | 2.15E−08 | 2.03E−08 | 2.31E−08 | N.N. | N.N. |
| ADI-25548 | Infant 2308 | 1.71E−08 | N.B. | N.B. | N.B. | N.N. | N.N. |
| ADI-25549 | Infant 2308 | 6.72E−09 | N.B. | 2.88E−08 | N.B. | 11.47 | 6.02 |
| ADI-25555 | Infant 2308 | 1.11E−08 | N.B. | 4.47E−08 | N.B. | 18.59 | 12.08 |
| ADI-25556 | Infant 2308 | 1.19E−08 | N.B. | 4.20E−08 | N.B. | N.N. | N.N. |
| ADI-25557 | Infant 2308 | 8.29E−09 | N.B. | 3.33E−08 | N.B. | N.N. | N.N. |
| ADI-25559 | Infant 2308 | 1.27E−08 | N.B. | 3.33E−08 | N.B. | N.N. | N.N. |
| ADI-25562 | Infant 2308 | 1.69E−09 | N.B. | 3.32E−09 | N.B. | 1.18 | 1.14 |
| ADI-25565 | Infant 2308 | 1.54E−08 | N.B. | 3.57E−08 | N.B. | N.N. | N.N. |
| ADI-25567 | Infant 2308 | 2.40E−09 | N.B. | 3.83E−09 | N.B. | 0.33 | 1.94 |
| ADI-25569 | Infant 2308 | N.B. | P.F. | P.F. | P.F. | N.N. | N.N. |
| ADI-25572 | Infant 2308 | N.B. | N.B. | P.F. | P.F. | N.N. | N.N. |
| ADI-25573 | Infant 2308 | N.B. | N.B. | N.B. | 4.86E−08 | N.N. | N.N. |
| ADI-25575 | Infant 2308 | N.B. | N.B. | N.B. | 3.96E−08 | 5.64 | N.N. |
| ADI-25576 | Infant 2308 | N.B. | N.B. | N.B. | 2.39E−08 | N.N. | N.N. |
| ADI-25577 | Infant 2308 | 1.40E−08 | N.B. | 4.42E−08 | N.B. | N.N. | N.N. |
| ADI-25587 | Infant 2308 | N.B. | 9.23E−09 | N.B. | 7.93E−09 | N.N. | N.N. |
| ADI-25588 | Infant 2308 | 1.73E−08 | N.B. | N.B. | N.B. | N.N. | N.N. |
| ADI-25595 | Infant 2308 | 1.27E−08 | N.B. | N.B. | N.B. | N.N. | N.N. |
| ADI-25598 | Infant 2308 | N.B. | N.B. | N.B. | P.F. | N.N. | N.N. |
| ADI-19420 | Infant 2026 | 5.70E−10 | N.B. | 2.47E−09 | N.B. | 0.55 | 0.64 |
| ADI-19421 | Infant 2026 | 7.22E−09 | N.B. | 5.42E−09 | N.B. | 10.00 | 3.30 |
| ADI-19422 | Infant 2026 | 2.23E−09 | N.B. | 1.08E−08 | N.B. | 0.73 | 1.90 |
| ADI-19424 | Infant 2026 | 1.07E−09 | N.B. | 1.71E−09 | N.B. | 0.08 | 0.21 |
| ADI-19425 | Infant 2026 | 4.56E−10 | N.B. | 1.37E−09 | N.B. | 0.02 | 0.04 |
| ADI-19426 | Infant 2026 | 2.87E−09 | N.B. | 1.29E−08 | N.B. | N.N. | N.N. |
| ADI-19427 | Infant 2026 | 2.78E−10 | N.B. | 5.00E−10 | N.B. | 0.01 | 0.03 |
| ADI-19428 | Infant 2026 | 4.96E−09 | N.B. | 1.67E−08 | N.B. | 3.25 | N.N. |
| ADI-19429 | Infant 2026 | 1.23E−08 | N.B. | N.B. | N.B. | N.N. | N.N. |
| ADI-19430 | Infant 2026 | 5.02E−09 | N.B. | 1.68E−08 | N.B. | N.N. | N.N. |
| ADI-19431 | Infant 2026 | 8.18E−09 | N.B. | 3.16E−09 | N.B. | 4.35 | 0.17 |
| ADI-19432 | Infant 2026 | P.F. | N.B. | N.B. | N.B. | 10.98 | N.N. |
| ADI-19433 | Infant 2026 | 3.60E−09 | N.B. | N.B. | N.B. | 1.56 | N.N. |
| ADI-19435 | Infant 2026 | N.B. | N.B. | N.B. | N.B. | N.N. | N.N. |
| ADI-19436 | Infant 2026 | N.B. | N.B. | N.B. | N.B. | N.N. | N.N. |
| ADI-19437 | Infant 2026 | N.B. | P.F. | N.B. | N.B. | N.N. | N.N. |
| ADI-19439 | Infant 2026 | N.B. | N.B. | N.B. | N.B. | N.N. | N.N. |
| ADI-19440 | Infant 2026 | 5.41E−09 | N.B. | 1.43E−08 | N.B. | N.N. | N.N. |
| ADI-19441 | Infant 2026 | N.B. | N.B. | N.B. | N.B. | N.N. | N.N. |
| ADI-19444 | Infant 2026 | N.B. | N.B. | N.B. | N.B. | N.N. | N.N. |
| ADI-19445 | Infant 2026 | N.B. | N.B. | N.B. | P.F. | N.N. | N.N. |
| ADI-19447 | Infant 2026 | P.F. | N.B. | N.B. | N.B. | N.N. | N.N. |
| ADI-19448 | Infant 2026 | 6.08E−09 | N.B. | 5.58E−09 | N.B. | 9.64 | N.N. |
| ADI-19449 | Infant 2026 | 1.48E−08 | N.B. | 2.60E−08 | N.B. | N.N. | N.N. |
| ADI-19450 | Infant 2026 | N.B. | N.B. | 3.86E−08 | N.B. | N.N. | N.N. |
| ADI-19454 | Infant 2026 | 2.52E−09 | N.B. | 1.57E−08 | N.B. | N.N. | N.N. |
| ADI-19455 | Infant 2026 | 1.80E−08 | N.B. | N.B. | N.B. | N.N. | N.N. |
| ADI-19457 | Infant 2026 | 8.29E−09 | N.B. | 1.67E−08 | N.B. | N.N. | N.N. |
| ADI-19458 | Infant 2026 | 2.15E−10 | N.B. | 2.43E−10 | N.B. | 0.04 | 0.07 |
| ADI-19459 | Infant 2026 | 1.09E−09 | N.B. | 1.45E−09 | N.B. | 0.05 | 0.10 |
| ADI-19460 | Infant 2026 | 7.50E−09 | N.B. | 6.01E−09 | N.B. | N.N. | N.N. |
| ADI-19461 | Infant 2026 | N.B. | N.B. | P.F. | N.B. | N.N. | N.N. |
| ADI-19462 | Infant 2026 | N.B. | P.F. | N.B. | N.B. | N.N. | N.N. |
| ADI-19463 | Infant 2026 | N.B. | N.B. | N.B. | N.B. | N.N. | N.N. |
| ADI-19465 | Infant 2026 | 2.74E−09 | N.B. | 1.94E−08 | N.B. | N.N. | N.N. |
| ADI-19506 | Infant 2026 | N.B. | N.B. | N.B. | N.B. | N.N. | N.N. |
| ADI-19507 | Infant 2026 | 1.09E−08 | N.B. | 1.01E−08 | N.B. | N.N. | N.N. |
| ADI-19509 | Infant 2026 | 9.33E−09 | N.B. | 1.58E−09 | N.B. | 3.42 | 1.56 |
| ADI-19510 | Infant 2026 | 2.38E−10 | N.B. | 2.39E−10 | N.B. | 0.16 | 0.83 |
| ADI-19511 | Infant 2026 | N.B. | N.B. | N.B. | 1.53E−08 | N.N. | N.N. |
| ADI-24792 | Infant 2301 | 6.52E−10 | N.B. | 1.83E−09 | N.B. | 0.27 | 0.19 |
| ADI-24793 | Infant 2301 | N.B. | N.B. | N.B. | 2.68E−08 | N.N. | N.N. |
| ADI-24795 | Infant 2301 | 2.39E−08 | N.B. | 3.42E−08 | N.B. | N.N. | N.N. |
| ADI-24796 | Infant 2301 | N.B. | N.B. | 8.22E−08 | N.B. | N.N. | N.N. |
| ADI-24798 | Infant 2301 | 9.92E−09 | N.B. | 5.27E−09 | N.B. | N.N. | N.N. |
| ADI-24799 | Infant 2301 | 1.22E−08 | N.B. | 1.90E−08 | N.B. | 11.53 | N.N. |
| ADI-24800 | Infant 2301 | 2.83E−08 | N.B. | 5.14E−08 | N.B. | N.N. | N.N. |
| ADI-24801 | Infant 2301 | 5.89E−08 | N.B. | N.B. | N.B. | N.N. | N.N. |
| ADI-24803 | Infant 2301 | N.B. | 1.20E−09 | N.B. | 4.42E−10 | N.N. | N.N. |
| ADI-24805 | Infant 2301 | 3.79E−09 | N.B. | 4.88E−09 | N.B. | 0.21 | 0.71 |
| ADI-24807 | Infant 2301 | N.B. | 1.64E−08 | N.B. | N.B. | N.N. | N.N. |
| ADI-24808 | Infant 2301 | N.B. | 1.08E−08 | N.B. | N.B. | N.N. | N.N. |
| ADI-24811 | Infant 2301 | 8.10E−09 | N.B. | 4.29E−09 | N.B. | N.N. | N.N. |
| ADI-24812 | Infant 2301 | 3.51E−09 | N.B. | 7.58E−09 | N.B. | 0.18 | N.N. |
| ADI-24813 | Infant 2301 | N.B. | N.B. | N.B. | N.B. | N.N. | N.N. |
| ADI-24814 | Infant 2301 | 8.11E−09 | N.B. | 2.39E−09 | N.B. | 0.73 | 0.32 |
| ADI-24815 | Infant 2301 | 1.84E−08 | N.B. | 2.91E−08 | N.B. | N.N. | N.N. |
| ADI-24816 | Infant 2301 | N.B. | N.B. | N.B. | N.B. | N.N. | N.N. |
| ADI-24817 | Infant 2301 | 6.80E−09 | N.B. | 9.23E−09 | N.B. | 2.20 | 4.40 |
| ADI-24818 | Infant 2301 | 3.36E−08 | 6.47E−09 | N.B. | N.B. | N.N. | N.N. |
| ADI-24819 | Infant 2301 | 6.52E−09 | N.B. | 9.44E−09 | N.B. | 4.33 | 6.28 |
| ADI-24820 | Infant 2301 | 3.06E−08 | N.B. | 3.85E−08 | N.B. | N.N. | N.N. |
| ADI-24821 | Infant 2301 | N.B. | N.B. | N.B. | N.B. | N.N. | N.N. |
| ADI-24822 | Infant 2301 | 4.65E−08 | N.B. | N.B. | N.B. | N.N. | N.N. |
| ADI-24823 | Infant 2301 | 4.16E−09 | N.B. | 6.03E−09 | N.B. | ND | ND |
| ADI-24824 | Infant 2301 | 1.51E−08 | N.B. | 4.75E−08 | N.B. | N.N. | N.N. |
| ADI-24825 | Infant 2301 | 3.31E−08 | 3.01E−08 | N.B. | 2.60E−08 | N.N. | N.N. |
| ADI-24826 | Infant 2301 | 6.88E−09 | N.B. | 9.03E−09 | N.B. | N.N. | N.N. |
| ADI-24827 | Infant 2301 | 7.42E−09 | N.B. | 6.62E−09 | N.B. | 0.02 | N.N. |
| ADI-24828 | Infant 2301 | 3.06E−10 | N.B. | 3.91E−10 | N.B. | 0.02 | 0.04 |
| ADI-24829 | Infant 2301 | N.B. | N.B. | N.B. | N.B. | N.N. | N.N. |
| ADI-24830 | Infant 2301 | N.B. | N.B. | N.B. | N.B. | N.N. | N.N. |
| ADI-24831 | Infant 2301 | 4.88E−09 | N.B. | 6.23E−09 | N.B. | 0.21 | 3.29 |
| ADI-24832 | Infant 2301 | 1.80E−09 | N.B. | 1.95E−09 | N.B. | 0.49 | 0.24 |
| ADI-24833 | Infant 2301 | 1.93E−08 | N.B. | 1.14E−08 | N.B. | N.N. | N.N. |
| ADI-24834 | Infant 2301 | 1.12E−09 | 2.11E−10 | 7.32E−10 | 2.60E−10 | N.N. | N.N. |
| ADI-24835 | Infant 2301 | 4.93E−09 | N.B. | 5.55E−09 | N.B. | 0.63 | 1.06 |
| ADI-24836 | Infant 2301 | 2.87E−09 | N.B. | 3.44E−09 | N.B. | N.N. | N.N. |
| ADI-24837 | Infant 2301 | 2.75E−08 | N.B. | N.B. | N.B. | N.N. | N.N. |
| ADI-24838 | Infant 2301 | N.B. | N.B. | N.B. | N.B. | N.N. | N.N. |
| ADI-24839 | Infant 2301 | 5.83E−09 | N.B. | 9.63E−09 | N.B. | 0.44 | 4.10 |
| ADI-24840 | Infant 2301 | 7.32E−09 | N.B. | 7.80E−09 | N.B. | N.N. | N.N. |
| ADI-24841 | Infant 2301 | N.B. | N.B. | 2.66E−08 | N.B. | N.N. | N.N. |
| ADI-24842 | Infant 2301 | 5.59E−10 | N.B. | 2.76E−09 | N.B. | 0.03 | 0.03 |
| ADI-24843 | Infant 2301 | N.B. | N.B. | N.B. | N.B. | N.N. | N.N. |
| ADI-24845 | Infant 2301 | 1.19E−08 | N.B. | 3.67E−08 | N.B. | N.N. | N.N. |
| ADI-24846 | Infant 2301 | N.B. | N.B. | N.B. | 2.91E−08 | N.N. | N.N. |
| ADI-24847 | Infant 2301 | N.B. | N.B. | 4.00E−08 | N.B. | N.N. | N.N. |
| ADI-24848 | Infant 2301 | 2.08E−08 | N.B. | 3.56E−08 | N.B. | N.N. | N.N. |
| ADI-24849 | Infant 2301 | 1.71E−10 | N.B. | 1.17E−09 | N.B. | 0.01 | 0.03 |
| ADI-24850 | Infant 2301 | 3.84E−09 | N.B. | 5.56E−09 | N.B. | 0.94 | 4.17 |
| ADI-24851 | Infant 2301 | N.B. | 2.09E−08 | N.B. | N.B. | N.N. | N.N. |
| ADI-24852 | Infant 2301 | 1.18E−08 | 9.57E−09 | 1.90E−08 | 9.17E−09 | N.N. | N.N. |
| ADI-24854 | Infant 2301 | N.B. | N.B. | 3.03E−08 | N.B. | N.N. | N.N. |
| ADI-24855 | Infant 2301 | 1.79E−08 | N.B. | 2.80E−08 | N.B. | N.N. | N.N. |
| ADI-24856 | Infant 2301 | 1.35E−08 | N.B. | 4.91E−09 | N.B. | N.N. | N.N. |
| ADI-24857 | Infant 2301 | 3.20E−09 | N.B. | 3.71E−09 | N.B. | 0.18 | 1.40 |
| ADI-24858 | Infant 2301 | 2.16E−08 | N.B. | 2.63E−08 | N.B. | N.N. | N.N. |
| ADI-24859 | Infant 2301 | 4.31E−09 | N.B. | 4.95E−09 | N.B. | 0.58 | N.N. |
| ADI-24860 | Infant 2301 | 1.08E−09 | N.B. | 1.56E−09 | N.B. | 0.06 | 0.09 |
| ADI-24861 | Infant 2301 | 3.01E−10 | N.B. | 4.61E−10 | N.B. | N.N. | N.N. |
| ADI-24862 | Infant 2301 | N.B. | N.B. | N.B. | N.B. | N.N. | N.N. |
| ADI-24863 | Infant 2301 | N.B. | N.B. | N.B. | N.B. | N.N. | N.N. |
| ADI-19467 | Infant 2021 | 9.13E−09 | N.B. | 3.77E−08 | N.B. | N.N. | N.N. |
| ADI-19468 | Infant 2021 | 2.22E−09 | N.B. | N.B. | N.B. | N.N. | N.N. |
| ADI-19469 | Infant 2021 | 1.74E−08 | N.B. | N.B. | N.B. | N.N. | N.N. |
| ADI-19470 | Infant 2021 | 2.97E−08 | N.B. | 1.97E−08 | N.B. | N.N. | N.N. |
| ADI-19471 | Infant 2021 | 3.23E−09 | N.B. | N.B. | N.B. | N.N. | N.N. |
| ADI-19473 | Infant 2021 | N.B. | N.B. | N.B. | N.B. | N.N. | N.N. |
| ADI-19474 | Infant 2021 | N.B. | N.B. | N.B. | N.B. | N.N. | N.N. |
| ADI-19475 | Infant 2021 | 1.43E−09 | N.B. | 4.25E−09 | N.B. | 0.05 | 0.04 |
| ADI-19476 | Infant 2021 | N.B. | 8.01E−10 | N.B. | 8.38E−10 | N.N. | N.N. |
| ADI-19478 | Infant 2021 | N.B. | 3.86E−10 | N.B. | 7.13E−10 | N.N. | N.N. |
| ADI-19479 | Infant 2021 | N.B. | 3.69E−09 | N.B. | 2.69E−09 | N.N. | N.N. |
| ADI-19480 | Infant 2021 | 3.95E−10 | 1.29E−10 | 3.83E−10 | 1.19E−10 | N.N. | 6.25 |
| ADI-19481 | Infant 2021 | 7.60E−09 | N.B. | N.B. | N.B. | N.N. | N.N. |
| ADI-19482 | Infant 2021 | 1.28E−09 | 1.71E−09 | 1.89E−09 | 5.55E−10 | 1.49 | 2.24 |
| ADI-19483 | Infant 2021 | 1.72E−09 | 3.21E−10 | 1.77E−09 | 1.53E−10 | N.N. | N.N. |
| ADI-19484 | Infant 2021 | 1.75E−09 | 3.69E−10 | 8.92E−09 | 3.55E−10 | N.N. | N.N. |
| ADI-19485 | Infant 2021 | 3.56E−09 | 2.51E−10 | N.B. | P.F. | N.N. | N.N. |
| ADI-19486 | Infant 2021 | 3.71E−09 | 5.25E−10 | N.B. | 7.55E−09 | N.N. | N.N. |
| ADI-19487 | Infant 2021 | N.B. | N.B. | N.B. | N.B. | N.N. | 7.96 |
| ADI-19488 | Infant 2021 | 9.02E−09 | N.B. | 1.07E−08 | N.B. | N.N. | 3.38 |
| ADI-19489 | Infant 2021 | N.B. | N.B. | N.B. | N.B. | N.N. | N.N. |
| ADI-19490 | Infant 2021 | N.B. | N.B. | N.B. | N.B. | N.N. | N.N. |
| ADI-19491 | Infant 2021 | N.B. | N.B. | N.B. | N.B. | N.N. | N.N. |
| ADI-19492 | Infant 2021 | N.B. | N.B. | N.B. | N.B. | N.N. | N.N. |
| ADI-19493 | Infant 2021 | 7.93E−09 | N.B. | 2.26E−08 | N.B. | N.N. | N.N. |
| ADI-19494 | Infant 2021 | 5.48E−09 | N.B. | N.B. | N.B. | 0.86 | N.N. |
| ADI-19495 | Infant 2021 | N.B. | N.B. | N.B. | N.B. | N.N. | N.N. |
| ADI-19496 | Infant 2021 | N.B. | N.B. | N.B. | N.B. | N.N. | N.N. |
| ADI-19497 | Infant 2021 | N.B. | P.F. | N.B. | 1.34E−08 | N.N. | N.N. |
| ADI-19498 | Infant 2021 | N.B. | P.F. | N.B. | P.F. | N.N. | N.N. |
| ADI-19499 | Infant 2021 | N.B. | N.B. | N.B. | N.B. | N.N. | N.N. |
| ADI-19500 | Infant 2021 | N.B. | N.B. | N.B. | N.B. | N.N. | N.N. |
| ADI-19501 | Infant 2021 | 4.46E−10 | N.B. | 1.59E−09 | N.B. | 0.02 | 0.02 |
| ADI-19502 | Infant 2021 | N.B. | N.B. | N.B. | N.B. | N.N. | N.N. |
| ADI-19503 | Infant 2021 | N.B. | N.B. | N.B. | 1.16E−08 | N.N. | N.N. |
| ADI-19505 | Infant 2021 | 1.33E−08 | 4.94E−09 | 4.44E−08 | 5.01E−09 | N.N. | N.N. |
| ADI-22756 | Infant 2201 | 7.85E−09 | N.B. | 5.58E−08 | N.B. | N.N. | N.N. |
| ADI-22757 | Infant 2201 | 3.10E−10 | N.B. | 5.38E−10 | N.B. | 0.06 | 0.07 |
| ADI-22758 | Infant 2201 | 6.32E−09 | N.B. | P.F. | N.B. | N.N. | N.N. |
| ADI-22759 | Infant 2201 | 2.97E−10 | 2.53E−08 | 3.53E−10 | 1.01E−08 | 0.08 | 0.20 |
| ADI-22760 | Infant 2201 | 5.21E−09 | 1.19E−09 | 3.07E−09 | 1.25E−09 | N.N. | N.N. |
| ADI-22762 | Infant 2201 | 5.76E−08 | P.F. | N.B. | N.B. | N.N. | N.N. |
| ADI-22763 | Infant 2201 | 1.58E−09 | 3.19E−10 | 1.08E−08 | 5.33E−09 | N.N. | N.N. |
| ADI-22764 | Infant 2201 | 2.27E−09 | 3.34E−10 | 1.42E−09 | 1.44E−09 | N.N. | N.N. |
| ADI-22765 | Infant 2201 | 4.04E−08 | N.B. | P.F. | N.B. | N.N. | N.N. |
| ADI-22766 | Infant 2201 | N.B. | N.B. | N.B. | N.B. | N.N. | N.N. |
| ADI-22767 | Infant 2201 | 1.71E−08 | N.B. | P.F. | N.B. | N.N. | N.N. |
| ADI-22768 | Infant 2201 | 5.61E−09 | 3.41E−09 | 4.57E−09 | N.B. | N.N. | N.N. |
| ADI-22769 | Infant 2201 | N.B. | N.B. | N.B. | P.F. | N.N. | N.N. |
| ADI-22770 | Infant 2201 | N.B. | P.F. | N.B. | P.F. | N.N. | N.N. |
| ADI-22771 | Infant 2201 | 7.06E−09 | N.B. | 9.41E−09 | N.B. | N.N. | N.N. |
| ADI-22772 | Infant 2201 | N.B. | N.B. | N.B. | 5.02E−08 | N.N. | N.N. |
| ADI-22773 | Infant 2201 | P.F. | N.B. | N.B. | N.B. | N.N. | N.N. |
| ADI-22774 | Infant 2201 | 2.06E−09 | N.B. | 4.28E−09 | N.B. | 0.29 | 7.53 |
| ADI-22775 | Infant 2201 | N.B. | 3.00E−08 | N.B. | P.F. | N.N. | N.N. |
| ADI-22776 | Infant 2201 | N.B. | N.B. | P.F. | N.B. | N.N. | N.N. |
| ADI-22777 | Infant 2201 | 1.80E−09 | 2.68E−10 | 7.62E−10 | 2.24E−10 | N.N. | N.N. |
| ADI-22778 | Infant 2201 | 6.22E−10 | 2.09E−10 | 4.02E−09 | 2.77E−09 | N.N. | N.N. |
| ADI-22779 | Infant 2201 | 1.60E−08 | 6.20E−09 | N.B. | N.B. | N.N. | N.N. |
| ADI-22780 | Infant 2201 | N.B. | 7.39E−10 | 2.38E−08 | 6.00E−10 | N.N. | N.N. |
| ADI-22781 | Infant 2201 | N.B. | P.F. | P.F. | P.F. | N.N. | N.N. |
| ADI-14333 | Infant 856 | 3.53E−10 | N.B. | 9.04E−10 | N.B. | 0.07 | 0.09 |
| ADI-14334 | Infant 856 | 3.16E−10 | N.B. | 6.22E−10 | N.B. | 0.05 | 0.11 |
| ADI-14335 | Infant 856 | 1.96E−10 | N.B. | 8.89E−10 | N.B. | 0.32 | 0.10 |
| ADI-14336 | Infant 856 | 3.12E−10 | N.B. | 2.65E−09 | N.B. | 0.07 | 0.09 |
| ADI-14337 | Infant 856 | 1.39E−09 | N.B. | 2.11E−09 | N.B. | 0.10 | 0.07 |
| ADI-14338 | Infant 856 | 8.41E−09 | 5.98E−09 | 7.04E−09 | 3.14E−09 | N.N. | 10.16 |
| ADI-14339 | Infant 856 | 2.45E−08 | 4.39E−10 | 1.77E−09 | 3.76E−10 | N.N. | N.N. |
| ADI-14340 | Infant 856 | 4.11E−10 | N.B. | 9.80E−08 | N.B. | 6.63 | 1.94 |
| ADI-14341 | Infant 856 | N.B. | 7.13E−10 | N.B. | 6.12E−10 | N.N. | 17.46 |
| ADI-14342 | Infant 856 | 1.57E−09 | 4.95E−10 | 2.61E−08 | P.F. | 1.75 | 8.27 |
| ADI-14343 | Infant 856 | 1.85E−08 | 2.94E−09 | 3.81E−08 | P.F. | N.N. | N.N. |
| ADI-14344 | Infant 856 | 1.81E−10 | N.B. | 5.86E−10 | N.B. | 8.68 | 1.20 |
| ADI-14345 | Infant 856 | 6.32E−09 | N.B. | 5.26E−09 | N.B. | 2.30 | 0.87 |
| ADI-14346 | Infant 856 | 3.09E−10 | N.B. | 9.25E−10 | N.B. | 0.05 | 0.07 |
| ADI-14347 | Infant 856 | 4.99E−10 | N.B. | 2.54E−09 | N.B. | 0.11 | 0.05 |
| ADI-14348 | Infant 856 | 1.96E−09 | 5.66E−09 | 1.10E−07 | N.B. | N.N. | N.N. |
| ADI-14349 | Infant 856 | 5.33E−09 | N.B. | 4.07E−09 | N.B. | N.N. | 1.84 |
| ADI-14350 | Infant 856 | 3.73E−09 | 2.64E−10 | 5.74E−10 | 1.48E−10 | N.N. | 4.82 |
| ADI-14351 | Infant 856 | 2.21E−08 | 3.61E−10 | 7.89E−10 | 2.15E−10 | N.N. | N.N. |
| ADI-14352 | Infant 856 | N.B. | 4.48E−10 | 5.54E−09 | 3.83E−10 | N.N. | N.N. |
| ADI-14353 | Infant 856 | 1.40E−08 | 2.60E−10 | 1.26E−08 | P.F. | N.N. | 14.62 |
| ADI-14354 | Infant 856 | 9.98E−09 | 1.04E−09 | 2.53E−08 | 6.63E−09 | N.N. | N.N. |
| ADI-14355 | Infant 856 | 6.60E−09 | 4.80E−10 | 1.25E−09 | 3.70E−10 | N.N. | 4.72 |
| ADI-14356 | Infant 856 | N.B. | 3.90E−09 | 1.30E−08 | 4.98E−09 | N.N. | N.N. |
| ADI-14357 | Infant 856 | 1.76E−10 | N.B. | 3.06E−10 | N.B. | 1.24 | 0.88 |
| ADI-14358 | Infant 856 | 5.91E−09 | 6.56E−10 | 6.03E−08 | 2.75E−08 | N.N. | N.N. |
| ADI-14359 | Infant 856 | N.B. | 4.11E−09 | 3.46E−08 | P.F. | N.N. | N.N. |
| ADI-14360 | Infant 856 | N.B. | 5.88E−09 | 2.68E−08 | 9.03E−09 | N.N. | N.N. |
| ADI-14361 | Infant 856 | N.B. | 4.37E−10 | 5.28E−08 | 2.93E−10 | N.N. | N.N. |
| ADI-14362 | Infant 856 | 3.15E−09 | 1.57E−08 | 1.19E−07 | N.B. | N.N. | N.N. |
| ADI-14363 | Infant 856 | 3.54E−09 | N.B. | 5.35E−09 | N.B. | N.N. | N.N. |
| ADI-14364 | Infant 856 | 6.30E−10 | N.B. | 6.16E−08 | N.B. | 0.03 | 2.39 |
| ADI-14365 | Infant 856 | 1.19E−09 | 1.03E−08 | 9.62E−10 | 2.23E−08 | 0.80 | 0.49 |
| ADI-14366 | Infant 856 | 6.14E−09 | N.B. | 1.80E−08 | N.B. | N.N. | N.N. |
| ADI-14367 | Infant 856 | 1.57E−10 | N.B. | 2.69E−10 | N.B. | 3.94 | 0.33 |
| ADI-14368 | Infant 856 | 2.60E−09 | 2.45E−08 | 1.21E−09 | 1.77E−08 | N.N. | 1.10 |
| ADI-14369 | Infant 856 | N.B. | 1.22E−09 | 3.38E−09 | 9.00E−10 | N.N. | N.N. |
| ADI-14370 | Infant 856 | 8.12E−09 | N.B. | 4.18E−09 | N.B. | N.N. | 1.38 |
| ADI-14371 | Infant 856 | N.B. | 1.23E−09 | 8.43E−09 | 1.07E−09 | N.N. | N.N. |
| ADI-14372 | Infant 856 | N.B. | 6.59E−10 | N.B. | 4.43E−09 | N.N. | N.N. |
| ADI-14373 | Infant 856 | 1.96E−09 | 1.06E−09 | 1.59E−08 | N.B. | N.N. | N.N. |
| ADI-14374 | Infant 856 | 4.61E−09 | N.B. | 2.09E−09 | N.B. | N.N. | 0.86 |
| ADI-14375 | Infant 856 | N.B. | 4.77E−10 | 3.21E−09 | 3.31E−09 | N.N. | N.N. |
| ADI-14376 | Infant 856 | P.F. | P.F. | P.F. | P.F. | N.N. | N.N. |
| ADI-14377 | Infant 856 | 6.64E−09 | N.B. | 5.28E−09 | N.B. | N.N. | 2.13 |
| ADI-14378 | Infant 856 | 5.87E−09 | N.B. | 6.10E−09 | N.B. | N.N. | 21.58 |
| ADI-14379 | Infant 856 | N.B. | 3.29E−09 | N.B. | 2.35E−09 | N.N. | N.N. |
| ADI-14380 | Infant 856 | 6.04E−09 | N.B. | 1.08E−08 | N.B. | N.N. | N.N. |
| ADI-14381 | Infant 856 | 2.20E−09 | 7.54E−10 | 3.67E−08 | P.F. | ND | ND |
| ADI-14382 | Infant 856 | N.B. | 8.46E−10 | N.B. | N.B. | N.N. | N.N. |
| ADI-14383 | Infant 856 | N.B. | 4.34E−10 | 1.75E−09 | 2.51E−10 | N.N. | N.N. |
| ADI-14384 | Infant 856 | 3.71E−09 | 4.69E−10 | 4.78E−09 | N.B. | N.N. | N.N. |
| ADI-14385 | Infant 856 | 8.72E−08 | P.F. | P.F. | P.F. | N.N. | N.N. |
| ADI-14386 | Infant 856 | 6.29E−09 | 1.32E−09 | 3.04E−09 | P.F. | N.N. | N.N. |
| ADI-14388 | Infant 856 | 5.58E−09 | N.B. | 5.50E−09 | N.B. | N.N. | 3.07 |
| ADI-14389 | Infant 856 | N.B. | 2.29E−08 | 8.15E−08 | P.F. | N.N. | N.N. |
| ADI-14390 | Infant 856 | N.B. | N.B. | N.B. | N.B. | N.N. | N.N. |
| ADI-14391 | Infant 856 | 6.95E−09 | N.B. | 5.36E−09 | N.B. | N.N. | 22.25 |
| ADI-14392 | Infant 856 | 7.56E−09 | N.B. | 7.25E−08 | N.B. | N.N. | N.N. |
| ADI-14393 | Infant 856 | 3.11E−10 | N.B. | 4.74E−10 | 1.17E−08 | ND | ND |
| ADI-14394 | Infant 856 | 1.15E−08 | N.B. | P.F. | N.B. | N.N. | N.N. |
| ADI-14395 | Infant 856 | 2.49E−08 | N.B. | P.F. | N.B. | N.N. | N.N. |
| ADI-14396 | Infant 856 | N.B. | N.B. | 1.55E−08 | N.B. | N.N. | N.N. |
| ADI-14397 | Infant 856 | 2.85E−08 | N.B. | P.F. | N.B. | N.N. | N.N. |
| ADI-14399 | Infant 856 | 1.89E−10 | N.B. | 3.65E−10 | N.B. | 0.97 | 0.46 |
| ADI-14400 | Infant 856 | 2.90E−10 | N.B. | 4.51E−10 | N.B. | ND | 3.71 |
| ADI-14401 | Infant 856 | 1.19E−09 | N.B. | 2.17E−09 | N.B. | 0.05 | 0.06 |
| ADI-14402 | Infant 856 | 2.79E−10 | N.B. | 4.16E−10 | N.B. | 0.02 | 0.03 |
| ADI-14403 | Infant 856 | 5.09E−10 | N.B. | 6.99E−10 | N.B. | 0.08 | 0.N.N.1 |
| ADI-14404 | Infant 856 | N.B. | 6.27E−10 | N.B. | 4.98E−10 | N.N. | N.N. |
| ADI-14405 | Infant 856 | 1.42E−10 | 1.17E−08 | 2.27E−10 | 3.80E−08 | 0.04 | 0.04 |
| ADI-14406 | Infant 856 | 6.85E−09 | 3.39E−10 | 9.06E−10 | 4.73E−10 | N.N. | N.N. |
| ADI-14407 | Infant 856 | 6.28E−09 | 3.78E−10 | 1.14E−08 | P.F. | N.N. | N.N. |
| ADI-14408 | Infant 856 | 8.53E−09 | 2.14E−09 | 1.28E−08 | P.F. | N.N. | N.N. |
| ADI-14409 | Infant 856 | 1.50E−10 | N.B. | 2.89E−10 | N.B. | 0.29 | 0.23 |
| ADI-14410 | Infant 856 | 3.77E−09 | N.B. | 1.71E−08 | N.B. | 1.22 | 2.64 |
| ADI-14411 | Infant 856 | 6.12E−09 | N.B. | 3.92E−09 | N.B. | 9.27 | 1.96 |
| ADI-14412 | Infant 856 | 5.60E−09 | N.B. | 1.34E−08 | N.B. | N.N. | N.N. |
| ADI-14413 | Infant 856 | 5.45E−09 | N.B. | 2.71E−09 | N.B. | 15.13 | 1.69 |
| ADI-14414 | Infant 856 | 5.00E−09 | N.B. | 3.07E−09 | N.B. | N.N. | N.N. |
| ADI-14415 | Infant 856 | 4.20E−09 | N.B. | 3.51E−09 | N.B. | N.N. | N.N. |
| ADI-14416 | Infant 856 | 2.39E−09 | 1.82E−10 | 3.69E−10 | 1.06E−10 | N.N. | N.N. |
| ADI-14417 | Infant 856 | N.B. | 1.63E−09 | N.B. | 3.99E−09 | ND | ND |
| ADI-14418 | Infant 856 | 1.25E−09 | 4.41E−10 | 1.58E−09 | 2.58E−10 | 0.30 | 0.66 |
| ADI-14419 | Infant 856 | 2.69E−09 | N.B. | N.B. | N.B. | N.N. | N.N. |
| ADI-14420 | Infant 856 | 6.35E−09 | N.B. | 4.32E−09 | N.B. | N.N. | N.N. |
| ADI-14421 | Infant 856 | N.B. | 1.07E−09 | 2.82E−09 | 7.40E−10 | N.N. | N.N. |
| ADI-14422 | Infant 856 | 1.14E−08 | 4.76E−09 | 3.39E−08 | N.B. | N.N. | N.N. |
| ADI-14423 | Infant 856 | 9.65E−09 | N.B. | 3.40E−09 | N.B. | N.N. | N.N. |
| ADI-14424 | Infant 856 | 3.43E−09 | N.B. | 1.90E−09 | N.B. | N.N. | 2.48 |
| ADI-14425 | Infant 856 | 4.81E−08 | 7.42E−10 | 2.03E−08 | 9.34E−09 | N.N. | N.N. |
| ADI-14426 | Infant 856 | 2.38E−08 | 3.96E−10 | 1.92E−08 | P.F. | N.N. | N.N. |
| ADI-14427 | Infant 856 | 2.34E−10 | 3.33E−09 | 1.08E−08 | N.B. | 0.25 | N.N. |
| ADI-14428 | Infant 856 | 4.22E−08 | N.B. | 1.41E−08 | N.B. | N.N. | N.N. |
| ADI-14654 | Infant 856 | 2.04E−09 | N.B. | 7.64E−09 | N.B. | N.N. | N.N. |
| ADI-14655 | Infant 856 | 1.69E−08 | P.F. | 1.40E−08 | P.F. | N.N. | N.N. |
| ADI-14656 | Infant 856 | P.F. | 3.70E−10 | 2.51E−08 | P.F. | N.N. | N.N. |
| ADI-14657 | Infant 856 | 2.84E−09 | N.B. | N.B. | N.B. | N.N. | N.N. |
| ADI-14658 | Infant 856 | N.B. | 1.58E−08 | N.B. | 1.79E−08 | N.N. | N.N. |
| ADI-14659 | Infant 856 | 4.86E−09 | N.B. | 3.71E−09 | N.B. | N.N. | 5.56 |
| ADI-14571 | Infant 856 | 2.91E−09 | N.B. | N.B. | N.B. | N.N. | 3.06 |
| ADI-14572 | Infant 856 | N.B. | 1.70E−08 | P.F. | N.B. | N.N. | N.N. |
| ADI-14573 | Infant 856 | N.B. | 3.73E−10 | 2.10E−08 | 3.55E−09 | N.N. | N.N. |
| ADI-14575 | Infant 856 | 1.12E−08 | P.F. | N.B. | N.B. | N.N. | N.N. |
| ADI-14576 | Infant 856 | 6.97E−09 | N.B. | 1.93E−08 | N.B. | 3.11 | 0.77 |
| ADI-14577 | Infant 856 | 4.39E−10 | N.B. | 2.19E−09 | N.B. | 0.04 | 0.05 |
| ADI-14578 | Infant 856 | 3.29E−09 | N.B. | 4.02E−09 | N.B. | N.N. | N.N. |
| ADI-14579 | Infant 856 | 7.54E−09 | P.F. | 3.73E−09 | N.B. | N.N. | N.N. |
| ADI-14580 | Infant 856 | 6.70E−09 | N.B. | 4.54E−09 | N.B. | N.N. | 3.75 |
| ADI-14581 | Infant 856 | N.B. | N.B. | 2.88E−09 | N.B. | N.N. | 6.25 |
| ADI-14582 | Infant 856 | 5.82E−09 | N.B. | 1.81E−09 | N.B. | ND | ND |
| ADI-14583 | Infant 856 | 4.74E−10 | N.B. | 1.59E−09 | N.B. | 0.05 | 0.06 |
| ADI-14584 | Infant 856 | P.F. | N.B. | 4.76E−10 | N.B. | 1.53 | 0.65 |
| ADI-14585 | Infant 856 | 2.72E−10 | N.B. | 4.49E−10 | N.B. | 0.02 | 0.03 |
| ADI-14586 | Infant 856 | 4.52E−10 | N.B. | 6.70E−09 | N.B. | 0.05 | 0.50 |
| ADI-14587 | Infant 856 | 6.09E−10 | N.B. | 8.33E−10 | N.B. | 0.15 | 0.11 |
| ADI-14588 | Infant 856 | 3.24E−09 | N.B. | 1.48E−09 | N.B. | 13.60 | 0.59 |
| ADI-14589 | Infant 856 | 6.48E−09 | 5.96E−10 | 2.82E−08 | 1.54E−08 | N.N. | N.N. |
| ADI-14590 | Infant 856 | 1.32E−08 | 2.68E−09 | 5.99E−09 | 9.67E−10 | N.N. | N.N. |
| ADI-14591 | Infant 856 | 1.87E−10 | N.B. | 5.54E−10 | N.B. | N.N. | 9.36 |
| ADI-14592 | Infant 856 | 2.40E−09 | 1.36E−10 | 3.01E−10 | 9.32E−11 | N.N. | N.N. |
| ADI-14593 | Infant 856 | 2.33E−09 | 1.61E−10 | 3.58E−10 | 1.08E−10 | 2.28 | 4.03 |
| ADI-14594 | Infant 856 | N.B. | 2.57E−10 | 1.82E−08 | 2.14E−10 | N.N. | N.N. |
| ADI-14595 | Infant 856 | 2.19E−09 | 1.30E−09 | 1.60E−08 | 1.44E−08 | ND | ND |
| ADI-14596 | Infant 856 | 1.86E−10 | N.B. | 1.86E−09 | N.B. | N.N. | N.N. |
| ADI-14597 | Infant 856 | 5.26E−09 | N.B. | 1.67E−09 | N.B. | N.N. | 3.05 |
| ADI-14598 | Infant 856 | P.F. | 4.52E−10 | 7.07E−09 | 4.81E−09 | N.N. | N.N. |
| ADI-14599 | Infant 856 | 1.02E−10 | 6.36E−10 | 6.22E−10 | 3.58E−10 | 0.14 | 1.11 |
| ADI-14600 | Infant 856 | 7.58E−10 | N.B. | 9.86E−10 | N.B. | 0.12 | 0.08 |
| ADI-14601 | Infant 856 | 3.79E−09 | N.B. | 1.96E−09 | N.B. | 12.19 | 3.10 |
| ADI-14602 | Infant 856 | 4.73E−09 | N.B. | 8.94E−09 | N.B. | N.N. | 6.53 |
| ADI-14603 | Infant 856 | 8.40E−09 | N.B. | 3.05E−08 | N.B. | N.N. | 2.03 |
| ADI-14604 | Infant 856 | 2.44E−09 | N.B. | 1.53E−09 | N.B. | N.N. | N.N. |
| ADI-14605 | Infant 856 | N.B. | 9.24E−10 | 2.72E−09 | 3.99E−10 | N.N. | N.N. |
| ADI-14606 | Infant 856 | N.B. | 1.28E−09 | N.B. | 6.59E−10 | 0.85 | 0.29 |
| ADI-14607 | Infant 856 | 1.70E−09 | 3.81E−10 | 6.40E−10 | 2.27E−10 | N.N. | 0.13 |
| ADI-20959 | Infant 2042 | 3.37E−10 | N.B. | 4.30E−10 | N.B. | 0.06 | 0.28 |
| ADI-20960 | Infant 2042 | 2.20E−10 | 1.63E−10 | 2.30E−10 | 1.63E−10 | 0.35 | 0.71 |
| ADI-20961 | Infant 2042 | 3.74E−10 | N.B. | 5.04E−10 | N.B. | 0.09 | 0.32 |
| ADI-20962 | Infant 2042 | 2.89E−10 | N.B. | 4.63E−10 | N.B. | 0.07 | 0.15 |
| ADI-20963 | Infant 2042 | 7.91E−10 | 9.09E−11 | 3.14E−09 | 6.14E−10 | N.N. | N.N. |
| ADI-20964 | Infant 2042 | 3.60E−10 | N.B. | 2.49E−09 | N.B. | 0.06 | 0.14 |
| ADI-20965 | Infant 2042 | 1.21E−10 | P.F. | 5.33E−10 | P.F. | 0.32 | 0.64 |
| ADI-20966 | Infant 2042 | 3.06E−10 | N.B. | 8.62E−10 | N.B. | 0.00 | 0.13 |
| ADI-20967 | Infant 2042 | 2.23E−09 | 2.57E−10 | 4.08E−09 | 3.45E−09 | N.N. | N.N. |
| ADI-20968 | Infant 2042 | 1.35E−10 | 1.57E−10 | 1.27E−10 | 1.50E−10 | 0.14 | 0.44 |
| ADI-20969 | Infant 2042 | 3.01E−10 | N.B. | 4.09E−10 | N.B. | 0.12 | 0.27 |
| ADI-20970 | Infant 2042 | 1.83E−09 | N.B. | 2.55E−09 | N.B. | 2.14 | 2.92 |
| ADI-20971 | Infant 2042 | 3.33E−10 | N.B. | 5.44E−10 | N.B. | N.N. | N.N. |
| ADI-20972 | Infant 2042 | 8.88E−10 | 4.01E−10 | 6.06E−09 | 3.48E−09 | N.N. | N.N. |
| ADI-20973 | Infant 2042 | 3.08E−10 | N.B. | 4.17E−10 | N.B. | 0.03 | 0.19 |
| ADI-20974 | Infant 2042 | 2.91E−10 | N.B. | 3.60E−10 | N.B. | 0.00 | 0.09 |
| ADI-20975 | Infant 2042 | 9.20E−11 | 1.46E−10 | 9.58E−11 | 1.29E−10 | 0.05 | 0.49 |
| ADI-20976 | Infant 2042 | 1.86E−09 | 2.63E−10 | 9.55E−10 | 3.04E−10 | N.N. | N.N. |
| ADI-20977 | Infant 2042 | 1.51E−10 | N.B. | P.F. | N.B. | N.N. | N.N. |
| ADI-20978 | Infant 2042 | 2.90E−10 | N.B. | 3.19E−10 | N.B. | 0.01 | 0.17 |
| ADI-20979 | Infant 2042 | 9.79E−10 | N.B. | 4.00E−09 | N.B. | 0.29 | 0.21 |
| ADI-20980 | Infant 2042 | 2.00E−10 | N.B. | 5.42E−10 | N.B. | N.N. | N.N. |
| ADI-20981 | Infant 2042 | 2.34E−09 | 2.33E−10 | 2.14E−09 | 2.95E−10 | N.N. | N.N. |
| ADI-20982 | Infant 2042 | 4.88E−09 | N.B. | 5.45E−09 | N.B. | N.N. | N.N. |
| ADI-20983 | Infant 2042 | 2.13E−10 | 2.05E−09 | 1.17E−09 | P.F. | N.N. | N.N. |
| ADI-20984 | Infant 2042 | 3.29E−09 | N.B. | 2.02E−08 | N.B. | N.N. | N.N. |
| ADI-20986 | Infant 2042 | 4.14E−10 | N.B. | 1.25E−09 | N.B. | 0.02 | 0.19 |
| ADI-20987 | Infant 2042 | 4.63E−09 | N.B. | 3.56E−08 | N.B. | N.N. | N.N. |
| ADI-20988 | Infant 2042 | 2.94E−10 | N.B. | 1.29E−09 | N.B. | 0.06 | 0.27 |
| ADI-20989 | Infant 2042 | 4.80E−09 | 4.28E−10 | 6.29E−09 | 8.09E−10 | N.N. | N.N. |
| ADI-20990 | Infant 2042 | 1.58E−09 | 1.78E−10 | 9.04E−10 | 3.12E−10 | N.N. | N.N. |
| ADI-20991 | Infant 2042 | 2.34E−10 | N.B. | 2.58E−10 | N.B. | 0.14 | 0.19 |
| ADI-20992 | Infant 2042 | 9.56E−10 | N.B. | 1.22E−09 | N.B. | 0.04 | 0.64 |
| ADI-20993 | Infant 2042 | 1.38E−09 | 1.68E−10 | 7.42E−10 | 2.73E−10 | N.N. | N.N. |
| ADI-20994 | Infant 2042 | 8.94E−11 | P.F. | 1.09E−10 | P.F. | 0.06 | 0.18 |
| ADI-20995 | Infant 2042 | 2.60E−09 | N.B | 1.36E−08 | N.B | ND | ND |
| ADI-20996 | Infant 2042 | 1.03E−09 | 2.04E−10 | 1.06E−09 | 1.12E−09 | N.N. | N.N. |
| ADI-20997 | Infant 2042 | 1.78E−09 | 1.97E−10 | 3.09E−09 | 6.09E−10 | N.N. | N.N. |
| ADI-20998 | Infant 2042 | 2.57E−10 | N.B. | 1.35E−09 | N.B. | 0.03 | N.N. |
| ADI-20999 | Infant 2042 | 4.16E−09 | N.B. | 2.41E−08 | N.B. | N.N. | N.N. |
| ADI-21000 | Infant 2042 | 1.49E−09 | 2.95E−10 | 1.30E−09 | 6.02E−10 | N.N. | N.N. |
| ADI-21001 | Infant 2042 | 2.12E−09 | 2.77E−10 | 1.85E−09 | 3.02E−10 | N.N. | N.N. |
| ADI-21002 | Infant 2042 | 2.36E−09 | 2.14E−10 | 8.60E−09 | 6.39E−09 | N.N. | N.N. |
| ADI-21003 | Infant 2042 | 4.75E−09 | 4.40E−10 | 9.87E−10 | 4.21E−10 | N.N. | N.N. |
| ADI-21004 | Infant 2042 | 4.59E−09 | 5.40E−10 | 1.02E−08 | 7.98E−10 | N.N. | 4.78 |
| ADI-21005 | Infant 2042 | 3.37E−09 | N.B. | 7.70E−09 | N.B. | N.N. | N.N. |
| ADI-21006 | Infant 2042 | 1.04E−08 | N.B. | N.B. | N.B. | N.N. | N.N. |
| ADI-21007 | Infant 2042 | 1.48E−09 | 1.71E−10 | 1.72E−09 | 1.71E−10 | N.N. | N.N. |
| ADI-21008 | Infant 2042 | 5.68E−09 | 9.18E−10 | 4.14E−09 | 1.45E−09 | N.N. | N.N. |
| ADI-21009 | Infant 2042 | 4.88E−09 | N.B. | 1.95E−08 | N.B. | N.N. | N.N. |
| ADI-21010 | Infant 2042 | 3.58E−09 | N.B. | N.B. | N.B. | N.N. | N.N. |
| ADI-21011 | Infant 2042 | 1.41E−09 | 1.62E−10 | 9.82E−10 | 3.56E−10 | N.N. | N.N. |
| ADI-21012 | Infant 2042 | 3.71E−10 | 2.14E−10 | 1.92E−09 | 2.80E−10 | N.N. | N.N. |
| ADI-21013 | Infant 2042 | 2.29E−09 | N.B. | 1.79E−09 | N.B. | 0.08 | 0.14 |
| ADI-21014 | Infant 2042 | 4.08E−10 | N.B. | 3.78E−10 | N.B. | 0.05 | 0.17 |
| ADI-21015 | Infant 2042 | 4.41E−09 | N.B. | 3.24E−08 | N.B. | 1.46 | 1.15 |
| ADI-21017 | Infant 2042 | 3.05E−10 | N.B. | 1.56E−09 | N.B. | N.N. | N.N. |
| ADI-21018 | Infant 2042 | 3.50E−10 | N.B. | 3.66E−10 | N.B. | 0.24 | 0.34 |
| ADI-21019 | Infant 2042 | 1.82E−10 | 1.54E−10 | 9.62E−10 | 1.68E−10 | 6.25 | 6.25 |
| ADI-21021 | Infant 2042 | 2.55E−09 | N.B. | 4.50E−09 | N.B. | N.N. | N.N. |
| ADI-21022 | Infant 2042 | N.B. | 2.56E−10 | 1.74E−08 | 3.57E−10 | N.N. | N.N. |
| ADI-21023 | Infant 2042 | 2.64E−10 | N.B. | 3.16E−10 | N.B. | 0.12 | 0.26 |
| ADI-21025 | Infant 2042 | 2.42E−10 | N.B. | 2.95E−10 | N.B. | 0.09 | 0.19 |
| ADI-21026 | Infant 2042 | 6.35E−09 | 9.45E−10 | 3.99E−09 | 1.43E−09 | N.N. | N.N. |
| ADI-21027 | Infant 2042 | 2.96E−10 | N.B. | 3.40E−10 | N.B. | 0.13 | 0.27 |
| ADI-21028 | Infant 2042 | 5.45E−09 | N.B. | 3.33E−09 | N.B. | N.N. | 9.09 |
| ADI-21029 | Infant 2042 | 3.77E−09 | N.B. | 8.38E−09 | N.B. | N.N. | 0.96 |
| ADI-21030 | Infant 2042 | 2.57E−10 | N.B. | 3.01E−10 | N.B. | 0.16 | 0.26 |
| ADI-21031 | Infant 2042 | 1.07E−09 | N.B. | 1.50E−09 | N.B. | 0.31 | 3.36 |
| ADI-21032 | Infant 2042 | 2.96E−10 | N.B. | 3.44E−10 | N.B. | 0.10 | 0.30 |
| ADI-21033 | Infant 2042 | 1.93E−10 | N.B. | 1.40E−09 | N.B. | 4.64 | 9.20 |
| ADI-21034 | Infant 2042 | 1.45E−10 | N.B. | 1.74E−10 | N.B. | N.N. | 7.30 |
| ADI-21035 | Infant 2042 | 1.03E−08 | N.B. | N.B. | N.B. | N.N. | N.N. |
| ADI-21036 | Infant 2042 | 5.52E−09 | N.B. | N.B. | N.B. | N.N. | N.N. |
| ADI-21037 | Infant 2042 | 1.95E−09 | 2.48E−10 | 4.81E−09 | 3.17E−09 | N.N. | N.N. |
| ADI-21038 | Infant 2042 | 2.93E−09 | 1.45E−09 | 1.60E−08 | N.B. | N.N. | N.N. |
| ADI-21039 | Infant 2042 | 1.71E−09 | 2.40E−10 | 1.27E−08 | 6.31E−09 | N.N. | N.N. |
| ADI-21040 | Infant 2042 | N.B. | 7.77E−10 | N.B. | 1.03E−09 | N.N. | N.N. |
| ADI-21041 | Infant 2042 | 7.30E−09 | N.B. | N.B. | N.B. | N.N. | N.N. |
| ADI-21042 | Infant 2042 | 2.96E−09 | 2.87E−10 | 1.18E−09 | 3.98E−10 | N.N. | N.N. |
| ADI-21043 | Infant 2042 | 1.11E−10 | 1.65E−09 | 1.54E−10 | 1.93E−09 | 0.19 | 0.08 |
| ADI-21044 | Infant 2042 | 4.51E−09 | N.B. | 5.85E−09 | N.B. | N.N. | 2.13 |
| ADI-21045 | Infant 2042 | 4.56E−10 | N.B. | 5.96E−10 | N.B. | 0.04 | 0.09 |
| ADI-21046 | Infant 2042 | 1.66E−09 | 1.87E−10 | 6.94E−10 | 2.24E−10 | N.N. | N.N. |
| ADI-21047 | Infant 2042 | 2.11E−09 | 2.90E−10 | 7.56E−10 | 2.62E−10 | N.N. | N.N. |
| ADI-21048 | Infant 2042 | 1.11E−10 | P.F. | P.F. | P.F. | 0.08 | 0.16 |
| ADI-21049 | Infant 2042 | 3.97E−10 | N.B. | 1.27E−09 | N.B. | 0.62 | 0.56 |
| ADI-21050 | Infant 2042 | 3.62E−10 | N.B. | 3.23E−10 | N.B. | 0.08 | 0.12 |
| ADI-21051 | Infant 2042 | 2.92E−10 | N.B. | 3.35E−10 | N.B. | N.N. | N.N. |
| ADI-21052 | Infant 2042 | 1.26E−10 | 1.84E−08 | 1.10E−10 | P.F. | 0.05 | 0.11 |
| ADI-21053 | Infant 2042 | 7.10E−08 | 6.37E−09 | N.B. | 1.18E−07 | N.N. | N.N. |
| ADI-21054 | Infant 2042 | 1.85E−10 | 3.72E−10 | 1.39E−10 | 3.06E−10 | 0.09 | 0.49 |
| ADI-21055 | Infant 2042 | 1.10E−09 | 1.85E−10 | 2.98E−09 | 4.35E−09 | ND | ND |
| ADI-21056 | Infant 2042 | 2.51E−10 | 7.22E−08 | 2.23E−10 | 6.34E−08 | 0.00 | 0.02 |
| ADI-21057 | Infant 2042 | 9.36E−10 | N.B. | 8.60E−10 | N.B. | 0.00 | 0.00 |
| ADI-21058 | Infant 2042 | 9.72E−10 | N.B. | 5.15E−10 | N.B. | 0.04 | 0.48 |
| ADI-21059 | Infant 2042 | 3.05E−09 | N.B. | 9.43E−09 | N.B. | N.N. | 0.30 |
| ADI-21060 | Infant 2042 | 4.26E−10 | N.B. | 3.49E−10 | N.B. | 0.06 | 0.14 |
| ADI-21061 | Infant 2042 | 1.10E−09 | 1.42E−10 | 2.76E−09 | 2.48E−09 | N.N. | N.N. |
| ADI-21062 | Infant 2042 | 1.24E−09 | 2.36E−10 | 8.27E−10 | 4.17E−10 | N.N. | N.N. |
| ADI-21063 | Infant 2042 | 8.34E−10 | N.B. | 7.77E−10 | N.B. | 0.04 | 0.11 |
| ADI-21064 | Infant 2042 | 3.20E−10 | N.B. | 2.80E−10 | N.B. | 0.03 | 0.12 |
| ADI-21065 | Infant 2042 | 1.71E−10 | N.B. | P.F. | N.B. | N.N. | N.N. |
| ADI-21067 | Infant 2042 | 3.98E−09 | N.B | 5.90E−09 | N.B | ND | ND |
| ADI-21068 | Infant 2042 | 2.55E−10 | 1.55E−08 | 2.38E−10 | 7.85E−09 | 0.10 | N.N. |
| ADI-21069 | Infant 2042 | 1.23E−10 | P.F. | 1.19E−10 | P.F. | 0.11 | 0.26 |
| ADI-21070 | Infant 2042 | 5.37E−09 | N.B. | 7.59E−09 | N.B. | N.N. | 2.38 |
| ADI-21071 | Infant 2042 | 1.17E−09 | 2.16E−10 | 1.88E−09 | 1.38E−09 | N.N. | N.N. |
| ADI-21072 | Infant 2042 | 3.41E−10 | N.B. | 3.32E−10 | N.B. | 0.04 | 0.33 |
| ADI-21073 | Infant 2042 | 4.06E−09 | 5.80E−10 | 1.78E−09 | 6.75E−10 | ND | 11.15 |
| ADI-21075 | Infant 2042 | 4.07E−10 | N.B. | 5.15E−10 | N.B. | 0.03 | 0.48 |
| ADI-21076 | Infant 2042 | 2.19E−10 | 7.34E−09 | 1.96E−10 | 6.28E−09 | 0.03 | 0.30 |
| ADI-21077 | Infant 2042 | 4.28E−10 | N.B. | 3.83E−10 | N.B. | 0.06 | 0.06 |
| ADI-21078 | Infant 2042 | 3.11E−10 | N.B. | 3.07E−10 | N.B. | 0.03 | 0.20 |
| ADI-21079 | Infant 2042 | 3.13E−10 | N.B. | 3.08E−10 | N.B. | 0.20 | 0.29 |
| ADI-21080 | Infant 2042 | 3.60E−10 | N.B. | 3.72E−10 | N.B. | 0.10 | 0.17 |
| ADI-21081 | Infant 2042 | 2.84E−10 | N.B. | 2.77E−10 | N.B. | 0.10 | 0.32 |
| ADI-21082 | Infant 2042 | 2.85E−10 | N.B. | 2.81E−10 | 6.17E−09 | 0.09 | 0.25 |
| ADI-21083 | Infant 2042 | 2.25E−09 | N.B. | 2.65E−09 | N.B. | 0.36 | 0.79 |
| ADI-21084 | Infant 2042 | 1.09E−10 | 1.73E−08 | 1.04E−10 | 2.29E−08 | 0.14 | 0.46 |
| ADI-21085 | Infant 2042 | 3.07E−10 | N.B. | 3.09E−10 | 6.24E−09 | 0.10 | 0.48 |
| ADI-21086 | Infant 2042 | 2.90E−10 | N.B. | 2.76E−10 | N.B. | 0.11 | 0.47 |
| ADI-21087 | Infant 2042 | N.B. | 5.45E−10 | N.B. | 4.76E−10 | N.N. | N.N. |
| ADI-21089 | Infant 2042 | 2.82E−10 | N.B. | 2.62E−10 | 3.34E−09 | 0.27 | 0.17 |
| ADI-21090 | Infant 2042 | 1.17E−09 | 1.76E−10 | 4.89E−10 | 1.75E−10 | ND | ND |
| ADI-21091 | Infant 2042 | 7.49E−10 | N.B. | 1.39E−09 | N.B. | 0.29 | 0.92 |

| | | | | | Number of | Number of |
|---|---|---|---|---|---|---|
| | Antigenic | | VH | LC | nucleotide | nucleotide |
| | Site | PSR | germline | germline | substitutions | substitutions |
| Name | Assignment | Score | gene usage | gene usage | in VH | in VL |
| ADI-25462 | Site III | 0.001 | VH3-21 | VL1-40 | 1 | 0 |
| ADI-25467 | Unknown | 0.000 | VH4-59 | VK1-39 | 0 | 0 |
| ADI-25468 | Unknown | 0.402 | VH5-51 | VL3-1 | 0 | 0 |
| ADI-25472 | Site III | 0.000 | VH3-21 | VL1-40 | 0 | 0 |
| ADI-25478 | Site III | 0.817 | VH3-21 | VL1-40 | 0 | 0 |
| ADI-25479 | Site III | 0.373 | VH3-21 | VL1-40 | 0 | 0 |
| ADI-25480 | Site III | 0.340 | VH3-21 | VL1-40 | 0 | 0 |
| ADI-25484 | Site III | 0.000 | VH3-21 | VL1-40 | 0 | 0 |
| ADI-25491 | Site I | 0.000 | VH4-31 | VL3-1 | 0 | 0 |
| ADI-25495 | Site III | 0.000 | VH3-21 | VL2-14 | 0 | 1 |
| ADI-25496 | Unknown | 0.000 | VH3-21 | VL1-40 | 0 | 0 |
| ADI-25497 | Site III | 0.000 | VH3-7 | VK1D-16 | 0 | 0 |
| ADI-25502 | Site III | 0.043 | VH1-69 | VL3-27 | 0 | 1 |
| ADI-25503 | Site III | 0.277 | VH1-69 | VL3-1 | 0 | 0 |
| ADI-25505 | Site III | 0.000 | VH3-21 | VL1-40 | 0 | 0 |
| ADI-25514 | Site II | 0.493 | VH1-69 | VL3-1 | 0 | 0 |
| ADI-25517 | Site I | 0.107 | VH1-2 | VL2-14 | 0 | 1 |
| ADI-25518 | Site I | 0.116 | VH1-2 | VL2-14 | 0 | 1 |
| ADI-25524 | Site III | 0.000 | VH3-21 | VL1-40 | 0 | 0 |
| ADI-25532 | Site III | 0.000 | VH3-21 | VL1-40 | 0 | 0 |
| ADI-25533 | Site I | 0.006 | VH1-2 | VL2-14 | 0 | 1 |
| ADI-25542 | Site I | 0.000 | VH3-23 | VL8-61 | 0 | 0 |
| ADI-25547 | Unknown | 0.000 | VH3-53 | VK1-12 | 0 | 0 |
| ADI-25548 | Unknown | 0.010 | VH3-53 | VL2-11 | 0 | 0 |
| ADI-25549 | Site III | 0.702 | VH3-21 | VL1-40 | 0 | 0 |
| ADI-25555 | Site III | 0.029 | VH3-21 | VL1-40 | 0 | 0 |
| ADI-25556 | Site III | 0.000 | VH3-21 | VL1-40 | 0 | 0 |
| ADI-25557 | Site III | 0.000 | VH3-21 | VL1-40 | 0 | 0 |
| ADI-25559 | Site III | 0.000 | VH3-21 | VL1-40 | 0 | 0 |
| ADI-25562 | Site III | 0.105 | VH3-11 | VL1-40 | 0 | 0 |
| ADI-25565 | Site III | 0.108 | VH3-21 | VL1-40 | 0 | 0 |
| ADI-25567 | Site I | 0.000 | VH4-34 | VK4-1 | 0 | 0 |
| ADI-25569 | Site I | 0.000 | VH3-74 | VL3-25 | 0 | 1 |
| ADI-25572 | Site IV | 0.184 | VH1-2 | VK2-28 | 0 | 0 |
| ADI-25573 | Unknown | 0.000 | VH1-46 | VL3-21 | 0 | 1 |
| ADI-25575 | Unknown | 0.000 | VH1-46 | VL3-21 | 0 | 0 |
| ADI-25576 | Site I | 0.000 | VH3-74 | VL6-57 | 0 | 0 |
| ADI-25577 | Site III | 0.028 | VH3-21 | VL1-40 | 0 | 0 |
| ADI-25587 | Unknown | 0.000 | VH3-33 | VL2-14 | 0 | 1 |
| ADI-25588 | Site III | 0.100 | VH3-21 | VL1-40 | 0 | 0 |
| ADI-25595 | Site III | 0.012 | VH3-21 | VL1-40 | 0 | 0 |
| ADI-25598 | Site I | 0.106 | VH4-39 | VL3-25 | 5 | 1 |
| ADI-19420 | Site III | 0.709 | VH3-21 | VL1-40 | 0 | 0 |
| ADI-19421 | Site III | 0.120 | VH3-30 | VL2-14 | 0 | 1 |
| ADI-19422 | Site IV | 0.102 | VH3-30 | VL3-21 | 0 | 0 |
| ADI-19424 | Site IV | 0.020 | VH3-66 | VL3-21 | 4 | 0 |
| ADI-19425 | Site III | 0.007 | VH3-21 | VL1-40 | 0 | 0 |
| ADI-19426 | Site IV | 0.023 | VH4-59 | VL3-1 | 0 | 0 |
| ADI-19427 | Site III | 0.022 | VH3-21 | VL1-40 | 3 | 4 |
| ADI-19428 | Site III | 0.058 | VH3-21 | VL1-40 | 0 | 0 |
| ADI-19429 | Site I | 0.616 | VH4-39 | VL1-40 | 0 | 0 |
| ADI-19430 | Site I | 0.744 | VH1-69 | VK2-28 | 0 | 0 |
| ADI-19431 | Site III | 0.068 | VH3-21 | VL1-40 | 0 | 0 |
| ADI-19432 | Site IV | 0.000 | VH1-46 | VK1-05 | 0 | 0 |
| ADI-19433 | Site III | 0.000 | VH3-21 | VL1-40 | 0 | 0 |
| ADI-19435 | Site I | 0.000 | VH4-61 | VL3-01 | 0 | 1 |
| ADI-19436 | Site I | 0.073 | VH4-39 | VL3-1 | 0 | 0 |
| ADI-19437 | Unknown | 0.000 | VH1-18 | VK1-12 | 0 | 0 |
| ADI-19439 | Site III | 0.000 | VH3-23 | VK1-05 | 0 | 0 |
| ADI-19440 | Site III | 0.000 | VH3-48 | VL1-40 | 0 | 0 |
| ADI-19441 | Site I | 0.417 | VH1-69 | VK1-39 | 0 | 0 |
| ADI-19444 | Site V | 0.000 | VH1-18 | VK4-01 | 0 | 0 |
| ADI-19445 | Unknown | 0.002 | VH4-4 | VL3-21 | 0 | 1 |
| ADI-19447 | Site III | 0.029 | VH4-39 | VL3-01 | 0 | 0 |
| ADI-19448 | Site III | 0.000 | VH3-21 | VL1-40 | 0 | 0 |
| ADI-19449 | Site III | 0.142 | VH3-21 | VL1-40 | 0 | 0 |
| ADI-19450 | Unknown | 0.000 | VH3-23 | VK1-05 | 0 | 0 |
| ADI-19454 | Site III | 0.012 | VH3-21 | VL2-14 | 0 | 1 |
| ADI-19455 | Site III | 0.007 | VH3-21 | VL1-40 | 0 | 0 |
| ADI-19457 | Site III | 0.000 | VH3-21 | VL1-40 | 0 | 0 |
| ADI-19458 | Site III | 0.101 | VH3-21 | VL1-40 | 3 | 0 |
| ADI-19459 | Site IV | 0.026 | VH3-66 | VL3-21 | 0 | 0 |
| ADI-19460 | Site I | 0.076 | VH4-34 | VK1-39 | 0 | 0 |
| ADI-19461 | Site II | 0.000 | VH3-11 | VL3-21 | 0 | 0 |
| ADI-19462 | Site IV | 0.000 | VH2-5 | VK1-5 | 0 | 0 |
| ADI-19463 | Unknown | 0.065 | VH4-304 | VK4-1 | 0 | 0 |
| ADI-19465 | Site III | 0.000 | VH3-21 | VL1-40 | 0 | 0 |
| ADI-19506 | Unknown | 0.424 | VH1-18 | VK2-28 | 0 | 0 |
| ADI-19507 | Site III | 0.000 | VH3-21 | VL1-40 | 0 | 0 |
| ADI-19509 | Site III | 0.000 | VH3-21 | VL1-40 | 0 | 0 |
| ADI-19510 | Site III | 0.108 | VH3-21 | N/A | 6 | 2 |
| ADI-19511 | Unknown | 0.444 | VH2-5 | VK1-17 | 0 | 0 |
| ADI-24792 | Site III | 0.000 | VH3-11 | VL1-40 | 5 | 2 |
| ADI-24793 | Site I | 0.000 | VH5-51 | VL6-57 | 1 | 2 |
| ADI-24795 | Site III | 0.000 | VH3-21 | VL1-40 | 0 | 0 |
| ADI-24796 | Unknown | 0.000 | VH3-33 | VL3-1 | 0 | 0 |
| ADI-24798 | Site I | 0.000 | VH4-59 | VL3-1 | 0 | 0 |
| ADI-24799 | Site III | 0.000 | VH3-21 | VL1-40 | 0 | 0 |
| ADI-24800 | Site III | 0.843 | VH3-21 | VL1-40 | 0 | 2 |
| ADI-24801 | Site III | 0.158 | VH1-18 | VL3-1 | 0 | 1 |
| ADI-24803 | Unknown | 0.077 | VH3-23 | VK3-20 | 6 | 3 |
| ADI-24805 | Site III | 0.000 | VH3-21 | VL1-40 | 0 | 0 |
| ADI-24807 | Site I | 0.083 | VH4-39 | VL3-1 | 0 | 0 |
| ADI-24808 | Site I | 0.000 | VH1-2 | VL2-8 | 0 | 0 |
| ADI-24811 | Site IV | 0.112 | VH1-8 | VL3-21 | 0 | 0 |
| ADI-24812 | Site V | 0.000 | VH3-23 | VL3-25 | 4 | 1 |
| ADI-24813 | Site IV | 0.000 | VH3-9 | VL1-40 | 0 | 0 |
| ADI-24814 | Site IV | 0.117 | VH3-30 | VK3-20 | 2 | 3 |
| ADI-24815 | Site III | 0.000 | VH3-21 | VL1-40 | 0 | 0 |
| ADI-24816 | Site I | 0.102 | VH1-8 | VL3-1 | 0 | 0 |
| ADI-24817 | Site III | 0.000 | VH3-21 | VL1-40 | 0 | 0 |
| ADI-24818 | Site I | 0.000 | VH1-2 | VL2-14 | 0 | 1 |
| ADI-24819 | Site III | 0.000 | VH3-21 | VL1-40 | 0 | 0 |
| ADI-24820 | Unknown | 0.248 | VH1-69 | VK1-39 | 0 | 0 |
| ADI-24821 | Site II | 0.000 | VH3-9 | VL1-44 | 0 | 0 |
| ADI-24822 | Site III | 0.000 | VH3-21 | VL1-40 | 0 | 0 |
| ADI-24823 | Site III | 0.000 | VH3-21 | VL1-40 | 0 | 0 |
| ADI-24824 | Site III | 0.000 | VH4-59 | VK1-8 | 0 | 0 |
| ADI-24825 | Unknown | 0.338 | VH1-8 | VK2-28 | 0 | 0 |
| ADI-24826 | Site III | 0.102 | VH3-21 | VL2-14 | 0 | 1 |
| ADI-24827 | Site 0 | 0.000 | VH3-66 | VK3-15 | 1 | 0 |
| ADI-24828 | Site III | 0.109 | VH3-21 | VL1-40 | 9 | 2 |
| ADI-24829 | Site III | 0.000 | VH3-21 | VL1-40 | 0 | 0 |
| ADI-24830 | Site V | 0.000 | VH1-69 | VK2-28 | 0 | 0 |
| ADI-24831 | Site III | 0.164 | VH3-21 | VL1-40 | 0 | 0 |
| ADI-24832 | Site III | 0.360 | VH3-21 | VL1-40 | 6 | 1 |
| ADI-24833 | Site III | 0.000 | VH3-21 | VL1-40 | 0 | 0 |
| ADI-24834 | Site I | 0.293 | VH3-23 | VK1-5 | 1 | 1 |
| ADI-24835 | Site III | 0.000 | VH3-21 | VL1-40 | 5 | 5 |
| ADI-24836 | Unknown | 0.106 | VH3-9 | VK1-39 | 0 | 0 |
| ADI-24837 | Unknown | 0.000 | VH4-59 | VL1-51 | 0 | 0 |
| ADI-24838 | Site III | 0.122 | VH3-21 | VL1-40 | 0 | 0 |
| ADI-24839 | Site III | 0.000 | VH3-21 | VL1-40 | 0 | 0 |
| ADI-24840 | Site III | 0.000 | VH3-21 | VL1-40 | 0 | 0 |
| ADI-24841 | Unknown | 0.144 | VH1-3 | VK3-15 | 0 | 0 |
| ADI-24842 | Site III | 0.000 | VH3-21 | VL1-40 | 0 | 2 |
| ADI-24843 | Unknown | 0.039 | VH4-304 | VK4-1 | 0 | 0 |
| ADI-24845 | Site III | 0.000 | VH3-21 | VL2-14 | 0 | 0 |
| ADI-24846 | Unknown | 0.000 | VH3-21 | VL1-47 | 0 | 0 |
| ADI-24847 | Unknown | 0.012 | VH3-21 | VL1-40 | 1 | 0 |
| ADI-24848 | Site V | 0.644 | VH3-21 | VL1-40 | 0 | 0 |
| ADI-24849 | Site 0 | 0.741 | VH3-43 | VK1-33 | 2 | 0 |
| ADI-24850 | Site III | 0.574 | VH3-21 | VL1-40 | 0 | 0 |
| ADI-24851 | Site I | 0.675 | VH1-2 | VL2-8 | 0 | 0 |
| ADI-24852 | Site IV | 0.277 | VH1-3 | VL3-1 | 1 | 2 |
| ADI-24854 | Unknown | 0.658 | VH3-21 | VL1-40 | 0 | 0 |
| ADI-24855 | Site III | 0.600 | VH3-21 | VL1-40 | 0 | 0 |
| ADI-24856 | Site I | 0.101 | VH1-18 | VK3-20 | 0 | 0 |
| ADI-24857 | Site III | 0.000 | VH3-21 | VL1-40 | 0 | 0 |
| ADI-24858 | Site III | 0.119 | VH3-21 | VL1-40 | 0 | 0 |
| ADI-24859 | Site III | 0.000 | VH3-21 | VL1-40 | 0 | 0 |
| ADI-24860 | Site III | 0.000 | VH3-11 | VL1-40 | 4 | 2 |
| ADI-24861 | Site III | 0.000 | VH3-21 | VL1-40 | 2 | 0 |
| ADI-24862 | Unknown | 0.000 | VH4-31 | VL3-1 | 0 | 0 |
| ADI-24863 | Site III | 0.000 | VH3-21 | VL1-40 | 1 | 0 |
| ADI-19467 | Site III | 0.010 | VH3-21 | VL1-40 | 0 | 0 |
| ADI-19468 | Site I | 0.000 | VH4-39 | VL6-57 | 0 | 0 |
| ADI-19469 | Site I | 0.143 | VH4-b | VK3-11 | 0 | 0 |
| ADI-19470 | Site II | 0.110 | VH3-30 | VL3-1 | 0 | 0 |
| ADI-19471 | Unknown | 0.040 | VH3-64 | VL6-57 | 0 | 0 |
| ADI-19473 | Site I | 0.063 | VH5-51 | VL6-57 | 0 | 0 |
| ADI-19474 | Site I | 0.032 | VH5-51 | VL6-57 | 0 | 0 |
| ADI-19475 | Site V | 0.000 | VH1-18 | VK2-30 | 10 | 2 |
| ADI-19476 | Unknown | 0.093 | VH2-5 | VL2-11 | 2 | 3 |
| ADI-19478 | Unknown | 0.033 | VH4-39 | VL1-36 | 5 | 2 |
| ADI-19479 | Unknown | 0.012 | VH1-69 | VK2-30 | 2 | 3 |
| ADI-19480 | Site IV | 0.012 | VH3-21 | VL6-57 | 6 | 3 |
| ADI-19481 | Unknown | 0.000 | VH3-43 | VK1-39 | 1 | 3 |
| ADI-19482 | Site II | 0.159 | VH4-34 | VK1-5 | 11 | 1 |
| ADI-19483 | Site IV | 0.050 | VH5-51 | VL6-57 | 4 | 2 |
| ADI-19484 | Unknown | 0.000 | VH4-30 | VK1-39 | 5 | 2 |
| ADI-19485 | Site I | 0.039 | VH4-31 | VK3-15 | 11 | 3 |
| ADI-19486 | Site I | 0.006 | VH4-59 | VL2-14 | 5 | 0 |
| ADI-19487 | Unknown | 0.104 | VH2-70 | VK1-39 | 3 | 0 |
| ADI-19488 | Unknown | 0.000 | VH1-24 | VK2-28 | 0 | 0 |
| ADI-19489 | Site IV | 0.000 | VH2-70 | VK1-17 | 2 | 0 |
| ADI-19490 | Unknown | 0.000 | VH3-15 | VK2-28 | 0 | 0 |
| ADI-19491 | Unknown | 0.000 | VH2-5 | VL1-40 | 0 | 0 |
| ADI-19492 | Site IV | 0.034 | VH5-51 | VL6-57 | 1 | 2 |
| ADI-19493 | Site I | 0.037 | VH4-34 | VL3-1 | 0 | 0 |
| ADI-19494 | Site 0 | 0.065 | VH1-69 | VL2-14 | 4 | 1 |
| ADI-19495 | Unknown | 0.047 | VH4-59 | VK1-12 | 0 | 0 |
| ADI-19496 | Unknown | 0.000 | VH3-30 | VK4-1 | 1 | 1 |
| ADI-19497 | Site I | 0.002 | VH1-46 | VL6-57 | 0 | 0 |
| ADI-19498 | Site I | 0.045 | VH3-66 | VL3-25 | 1 | 0 |
| ADI-19499 | Site I | 0.089 | VH4-39 | VL6-57 | 0 | 0 |
| ADI-19500 | Unknown | 0.000 | VH3-48 | VK1-8 | 0 | 0 |
| ADI-19501 | Site V | 0.000 | VH1-18 | VK2-30 | 6 | 2 |
| ADI-19502 | Unknown | 0.000 | VH3-30 | VK4-1 | 5 | 2 |
| ADI-19503 | Site I | 0.040 | VH1-46 | VL3-10 | 0 | 0 |
| ADI-19505 | Site IV | 0.039 | VH5-51 | VL3-9 | 5 | 1 |
| ADI-22756 | Unknown | 0.171 | VH3-30 | VK3-20 | 6 | 4 |
| ADI-22757 | Site V | 0.000 | VH1-18 | VK2-30 | 7 | 4 |
| ADI-22758 | Site III | 0.000 | VH3-21 | VL1-40 | 5 | 3 |
| ADI-22759 | Site III | 0.018 | VH3-21 | VL1-40 | 9 | 3 |
| ADI-22760 | Site II | 0.000 | VH3-9 | VL1-47 | 5 | 4 |
| ADI-22762 | Site I | 0.000 | VH6-1 | VL1-40 | 7 | 4 |
| ADI-22763 | Site I | 0.000 | VH3-48 | VK1-39 | 9 | 3 |
| ADI-22764 | Site I | 0.336 | VH4-4 | VK1-39 | 5 | 12 |
| ADI-22765 | Site V | 0.000 | VH3-21 | VL1-40 | 0 | 0 |
| ADI-22766 | Unknown | 0.000 | VH3-9 | VL2-8 | 0 | 1 |
| ADI-22767 | Site III | 0.033 | VH3-21 | VL1-40 | 0 | 0 |
| ADI-22768 | Site I | 0.000 | VH3-48 | VK1-39 | 0 | 0 |
| ADI-22769 | Unknown | 0.011 | VH3-72 | VL3-1 | 0 | 0 |
| ADI-22770 | Unknown | 0.004 | VH2-70 | VL3-1 | 0 | 0 |
| ADI-22771 | Site III | 0.010 | VH3-21 | VL1-40 | 0 | 0 |
| ADI-22772 | Unknown | 0.000 | VH3-30 | VL3-1 | 0 | 0 |
| ADI-22773 | Site V | 0.000 | VH1-18 | VK2-30 | 0 | 0 |
| ADI-22774 | Site III | 0.000 | VH3-21 | VL1-40 | 0 | 4 |
| ADI-22775 | Unknown | 0.000 | VH3-33 | VK1-12 | 4 | 2 |
| ADI-22776 | Unknown | 0.000 | VH3-11 | VL3-21 | 0 | 0 |
| ADI-22777 | Site II | 0.000 | VH1-02 | VL3-01 | 12 | 13 |
| ADI-22778 | Site I | 0.109 | VH4-59 | VK1-39 | 12 | 7 |
| ADI-22779 | Site I | 0.000 | VH4-34 | VK1-39 | 7 | 8 |
| ADI-22780 | Site III | 0.004 | VH4-31 | VL2-14 | 0 | 2 |
| ADI-22781 | Site I | 0.033 | VH3-48 | VL3-01 | 0 | 0 |
| ADI-14333 | Site III | 0.046 | VH3-21 | VL1-40 | 7 | 4 |
| ADI-14334 | Site III | 0.005 | VH3-21 | VL1-40 | 14 | 4 |
| ADI-14335 | Site IV | 0.000 | VH3-49 | VK1-39 | 4 | 6 |
| ADI-14336 | Site V | 0.005 | VH1-18 | VK2-30 | 4 | 5 |
| ADI-14337 | Site III | 0.000 | VH3-21 | VL1-40 | 0 | 0 |
| ADI-14338 | Site I | 0.000 | VH3-30 | VK1-39 | 13 | 3 |
| ADI-14339 | Site IV | 0.040 | VH3-30 | VL3-25 | 14 | 4 |
| ADI-14340 | Site 0 | 0.050 | VH3-21 | VL3-21 | 7 | 5 |
| ADI-14341 | Unknown | 0.111 | VH3-48 | VK1-5 | 7 | 1 |
| ADI-14342 | Site I | 0.000 | VH2-26 | VK1-39 | 3 | 6 |
| ADI-14343 | Site I | 0.003 | VH1-69 | VK2-28 | 8 | 5 |
| ADI-14344 | Unknown | 0.113 | VH3-23 | VL3-1 | 8 | 7 |
| ADI-14345 | Site IV | 0.059 | VH1-24 | VK1-39 | 9 | 1 |
| ADI-14346 | Site III | 0.102 | VH3-21 | VL1-40 | 8 | 1 |
| ADI-14347 | Site III | 0.040 | VH3-21 | VL1-40 | 6 | 1 |
| ADI-14348 | Site I | 0.105 | VH3-30 | VL2-11 | 10 | 5 |
| ADI-14349 | Unknown | 0.000 | VH1-69 | VK4-1 | 9 | 3 |
| ADI-14350 | Site II | 0.027 | VH4-61 | VL1-40 | 13 | 2 |
| ADI-14351 | Site IV | 0.027 | VH3-74 | VL3-21 | 9 | 3 |
| ADI-14352 | Unknown | 0.142 | VH4-304 | VK3-20 | 5 | 3 |
| ADI-14353 | Site I | 0.051 | VH1-69 | VL2-14 | 10 | 4 |
| ADI-14354 | Site I | 0.069 | VH1-69 | VL2-14 | 8 | 6 |
| ADI-14355 | Site IV | 0.038 | VH2-5 | VL2-14 | 4 | 7 |
| ADI-14356 | Site I | 0.034 | VH4-34 | VL3-25 | 0 | 0 |
| ADI-14357 | Unknown | 0.000 | VH3-30 | VK1-39 | 5 | 4 |
| ADI-14358 | Site I | 0.103 | VH3-11 | VL2-14 | 7 | 12 |
| ADI-14359 | Site I | 0.000 | VH2-70 | VK1-39 | 1 | 0 |
| ADI-14360 | Site IV | 0.000 | VH1-3 | VK2-28 | 2 | 0 |
| ADI-14361 | Unknown | 0.068 | VH3-23 | VL1-40 | 14 | 7 |
| ADI-14362 | Site I | 0.389 | VH3-23 | VK1-39 | 2 | 1 |
| ADI-14363 | Site IV | 0.000 | VH3-11 | VK3-20 | 6 | 4 |
| ADI-14364 | Site 0 | 0.104 | VH5-51 | VL3-21 | 3 | 0 |
| ADI-14365 | Site IV | 0.000 | VH1-24 | VK1-39 | 8 | 4 |
| ADI-14366 | Unknown | 0.000 | VH1-18 | VK1-39 | 8 | 8 |
| ADI-14367 | Unknown | 0.000 | VH3-23 | VK3-20 | 10 | 2 |
| ADI-14368 | Site II | 0.106 | VH3-15 | VL3-21 | 4 | 6 |
| ADI-14369 | Unknown | 0.059 | VH1-69 | VL1-44 | 6 | 6 |
| ADI-14370 | Unknown | 0.726 | VH3-30 | VL2-8 | 6 | 0 |
| ADI-14371 | Unknown | 0.000 | VH3-23 | VK1-39 | 10 | 8 |
| ADI-14372 | Unknown | 0.000 | VH3-23 | VK1-6 | 11 | 3 |
| ADI-14373 | Site I | 0.000 | VH4-34 | VK3-15 | 4 | 0 |
| ADI-14374 | Unknown | 0.103 | VH3-43 | VL3-21 | 6 | 13 |
| ADI-14375 | Unknown | 0.019 | VH3-23 | VL1-40 | 10 | 6 |
| ADI-14376 | Site I | 0.085 | VH3-74 | VL3-10 | 7 | 3 |
| ADI-14377 | Unknown | 0.000 | VH3-30 | VK1-17 | 5 | 0 |
| ADI-14378 | Unknown | 0.000 | VH3-74 | VK1-39 | 3 | 3 |
| ADI-14379 | Unknown | 0.487 | VH3-30 | VL3-1 | 5 | 11 |
| ADI-14380 | Unknown | 0.102 | VH5-51 | VL1-51 | 5 | 2 |
| ADI-14381 | Site I | 0.009 | VH3-48 | VK1-6 | 7 | 1 |
| ADI-14382 | Site I | 0.118 | VH3-33 | VL2-14 | 8 | 5 |
| ADI-14383 | Site II | 0.100 | VH2-5 | VL2-23 | 6 | 4 |
| ADI-14384 | Site I | 0.062 | VH4-30 | VL3-21 | 7 | 7 |
| ADI-14385 | Site I | 0.028 | VH5-51 | VL6-57 | 0 | 1 |
| ADI-14386 | Site I | 0.070 | VH3-23 | VL3-1 | 6 | 7 |
| ADI-14388 | Unknown | 0.147 | VH3-30 | VL7-43 | 2 | 4 |
| ADI-14389 | Site I | 0.181 | VH3-15 | VK1-39 | 12 | 6 |
| ADI-14390 | Unknown | 0.129 | VH4-b | VL2-23 | 1 | 3 |
| ADI-14391 | Unknown | 0.033 | VH3-23 | VL3-10 | 11 | 4 |
| ADI-14392 | Unknown | 0.000 | VH1-69 | VK3-11 | 2 | 0 |
| ADI-14393 | Site III | 0.199 | VH3-21 | VL1-40 | 14 | 4 |
| ADI-14394 | Site III | 0.038 | VH3-21 | VL1-40 | 0 | 0 |
| ADI-14395 | Site IV | 0.128 | VH3-30 | VK1-5 | 0 | 0 |
| ADI-14396 | Unknown | 0.000 | VH3-30 | VK1-33 | 0 | 0 |
| ADI-14397 | Site IV | 0.120 | VH3-30 | VK1-5 | 0 | 0 |
| ADI-14399 | Unknown | 0.004 | VH4-304 | VK3-11 | 7 | 4 |
| ADI-14400 | Unknown | 0.000 | VH3-30 | VK1-6 | 8 | 1 |
| ADI-14401 | Site III | 0.005 | VH3-21 | VL1-40 | 9 | 4 |
| ADI-14402 | Site V | 0.000 | VH1-18 | VK2-30 | 3 | 2 |
| ADI-14403 | Site III | 0.010 | VH3-11 | VL1-40 | 7 | 4 |
| ADI-14404 | Unknown | 0.037 | VH3-48 | VK1-5 | 7 | 5 |
| ADI-14405 | Site IV | 0.031 | VH1-18 | VL3-21 | 11 | 5 |
| ADI-14406 | Site I | 0.060 | VH5-51 | VK2-28 | 10 | 1 |
| ADI-14407 | Site I | 0.000 | VH3-33 | VK1-39 | 5 | 7 |
| ADI-14408 | Site I | 0.000 | VH2-70 | VK1-39 | 5 | 5 |
| ADI-14409 | Unknown | 0.014 | VH1-18 | VK4-1 | 6 | 4 |
| ADI-14410 | Unknown | 0.101 | VH4-34 | VL1-47 | 8 | 6 |
| ADI-14411 | Unknown | 0.047 | VH1-46 | VK1-39 | 7 | 5 |
| ADI-14412 | Site IV | 0.000 | VH1-18 | VK3-20 | 9 | 5 |
| ADI-14413 | Unknown | 0.028 | VH3-43 | VL1-44 | 9 | 6 |
| ADI-14414 | Unknown | 0.109 | VH1-69 | VK3-11 | 15 | 7 |
| ADI-14415 | Unknown | 0.000 | VH4-59 | VK1-9 | 7 | 5 |
| ADI-14416 | Site IV | 0.053 | VH5-51 | VL6-57 | 23 | 5 |
| ADI-14417 | Unknown | 0.297 | VH3-21 | VK3-15 | 9 | 3 |
| ADI-14418 | Site II | 0.000 | VH1-69 | VK1-5 | 10 | 3 |
| ADI-14419 | Unknown | 0.325 | VH3-30 | VK3-20 | 9 | 1 |
| ADI-14420 | Site IV | 0.000 | VH3-43 | VK1-5 | 4 | 3 |
| ADI-14421 | Unknown | 0.055 | VH5-51 | VK3-15 | 20 | 2 |
| ADI-14422 | Site I | 0.000 | VH1-69 | VL1-40 | 1 | 0 |
| ADI-14423 | Unknown | 0.000 | VH3-43 | VK1-17 | 7 | 0 |
| ADI-14424 | Site II | 0.051 | VH5-51 | VL6-57 | 16 | 9 |
| ADI-14425 | Site I | 0.027 | VH4-61 | VL2-14 | 5 | 2 |
| ADI-14426 | Site I | 0.072 | VH3-30 | VL3-19 | 8 | 5 |
| ADI-14427 | Site I | 0.108 | VH1-69 | VL2-11 | 9 | 1 |
| ADI-14428 | Unknown | 0.110 | VH3-11 | VL3-21 | 4 | 2 |
| ADI-14654 | Unknown | 0.106 | VH1-69 | VL3-19 | 10 | 5 |
| ADI-14655 | Site I | 0.000 | VH3-15 | VK1-39 | 0 | 0 |
| ADI-14656 | Site I | 0.050 | VH3-30 | VL3-19 | 8 | 5 |
| ADI-14657 | Site IV | 0.000 | VH1-18 | VK1-27 | 9 | 1 |
| ADI-14658 | Site I | 0.040 | VH3-33 | VL2-14 | 0 | 1 |
| ADI-14659 | Unknown | 0.000 | VH3-11 | VK3-20 | 9 | 10 |
| ADI-14571 | Unknown | 0.000 | VH1-69 | VK1-9 | 10 | 1 |
| ADI-14572 | Unknown | 0.148 | VH3-15 | VL1-44 | 4 | 3 |
| ADI-14573 | Unknown | 0.031 | VH1-18 | VL3-21 | 7 | 3 |
| ADI-14575 | Site I | 0.096 | VH1-69 | VL2-14 | 0 | 1 |
| ADI-14576 | Site V | 0.000 | VH1-18 | VK2-30 | 0 | 0 |
| ADI-14577 | Site V | 0.000 | VH1-18 | VK2-30 | 11 | 3 |
| ADI-14578 | Unknown | 0.120 | VH1-69 | VL1-51 | 6 | 6 |
| ADI-14579 | Site I | 0.117 | VH5-51 | VK1-27 | 2 | 0 |
| ADI-14580 | Unknown | 0.000 | VH1-69 | VK4-1 | 12 | 3 |
| ADI-14581 | Unknown | 0.000 | VH1-69 | VK3-15 | 13 | 3 |
| ADI-14582 | Site II | 0.104 | VH5-51 | VL6-57 | 15 | 8 |
| ADI-14583 | Site V | 0.000 | VH1-18 | VK2-30 | 10 | 4 |
| ADI-14584 | Unknown | 0.000 | VH1-18 | VK1-39 | 20 | 2 |
| ADI-14585 | Site V | 0.000 | VH1-18 | VK2-30 | 5 | 5 |
| ADI-14586 | Site III | 0.000 | VH3-11 | VL1-40 | 0 | 0 |
| ADI-14587 | Site III | 0.010 | VH3-21 | VL1-40 | 3 | 2 |
| ADI-14588 | Site IV | 0.000 | VH1-24 | VK1-39 | 9 | 2 |
| ADI-14589 | Site I | 0.000 | VH2-26 | VK1-39 | 6 | 8 |
| ADI-14590 | Site II | 0.000 | VH5-51 | VK1-13 | 3 | 2 |
| ADI-14591 | Unknown | 0.116 | VH5-a | VK1-39 | 7 | 4 |
| ADI-14592 | Site IV | 0.083 | VH5-51 | VL6-57 | 12 | 4 |
| ADI-14593 | Site IV | 0.017 | VH5-51 | VL6-57 | 7 | 4 |
| ADI-14594 | Unknown | 0.030 | VH1-18 | VL3-21 | 10 | 2 |
| ADI-14595 | Site I | 0.101 | VH3-48 | VK3-11 | 10 | 5 |
| ADI-14596 | Unknown | 0.052 | VH3-23 | VK1-39 | 2 | 0 |
| ADI-14597 | Site IV | 0.000 | VH3-43 | VK3-20 | 6 | 1 |
| ADI-14598 | Site I | 0.000 | VH1-69 | VK1-27 | 8 | 1 |
| ADI-14599 | Site IV | 0.092 | VH3-49 | VL6-57 | 7 | 2 |
| ADI-14600 | Site III | 0.069 | VH3-11 | VL1-40 | 3 | 1 |
| ADI-14601 | Unknown | 0.045 | VH3-23 | VK1-12 | 5 | 5 |
| ADI-14602 | Site IV | 0.114 | VH3-30 | VL3-1 | 6 | 5 |
| ADI-14603 | Unknown | 0.036 | VH5-51 | VK1-27 | 6 | 4 |
| ADI-14604 | Unknown | 0.110 | VH3-23 | VL1-44 | 11 | 7 |
| ADI-14605 | Unknown | 0.103 | VH2-70 | VL3-25 | 5 | 6 |
| ADI-14606 | Unknown | 0.000 | VH3-66 | VK3-15 | 4 | 5 |
| ADI-14607 | Site IV | 0.075 | VH3-30 | VL3-25 | 10 | 8 |
| ADI-20959 | Site V | 0.000 | VH1-18 | VK2-30 | 7 | 5 |
| ADI-20960 | Site II | 0.102 | VH4-34 | VK1-5 | 14 | 7 |
| ADI-20961 | Site III | 0.059 | VH3-21 | VL1-40 | 20 | 5 |
| ADI-20962 | Site V | 0.000 | VH1-18 | VK2-30 | 10 | 2 |
| ADI-20963 | Site I | 0.051 | VH3-21 | VL3-21 | 17 | 9 |
| ADI-20964 | Site V | 0.000 | VH1-18 | VK2-30 | 4 | 2 |
| ADI-20965 | site IV | 0.109 | VH1-18 | VL3-21 | 11 | 6 |
| ADI-20966 | Site III | 0.035 | VH3-21 | VL1-40 | 20 | 8 |
| ADI-20967 | Site I | 0.000 | VH3-30 | VK2-28 | 11 | 1 |
| ADI-20968 | site IV | 0.000 | VH4-34 | VK1-33 | 11 | 10 |
| ADI-20969 | Site III | 0.094 | VH3-21 | VL1-40 | 13 | 6 |
| ADI-20970 | Unknown | 0.000 | VH3-15 | VK1-33 | 3 | 5 |
| ADI-20971 | Site I | 0.000 | VH3-21 | VK3-15 | 20 | 7 |
| ADI-20972 | Site I | 0.103 | VH4-34 | VL2-14 | 13 | 5 |
| ADI-20973 | Site III | 0.096 | VH3-21 | VL1-40 | 13 | 6 |
| ADI-20974 | Site III | 0.107 | VH3-21 | VL1-40 | 18 | 6 |
| ADI-20975 | site IV | 0.028 | VH1-18 | VL3-21 | 20 | 8 |
| ADI-20976 | Site I | 0.000 | VH3-23 | VK1-39 | 33 | 10 |
| ADI-20977 | Unknown | 0.000 | VH3-23 | VK3-20 | 3 | 1 |
| ADI-20978 | Site V | 0.000 | VH1-18 | VK2-30 | 8 | 1 |
| ADI-20979 | Site 0 | 0.034 | VH4-59 | VL2-14 | 8 | 5 |
| ADI-20980 | Unknown | 0.000 | VH4-61 | VK3-11 | 9 | 7 |
| ADI-20981 | Unknown | 0.352 | VH4-304 | VK1-12 | 18 | 8 |
| ADI-20982 | Unknown | 0.000 | VH4-61 | VK1-5 | 15 | 7 |
| ADI-20983 | Site I | 0.000 | VH3-64 | VK1-33 | 13 | 5 |
| ADI-20984 | Site IV | 0.026 | VH1-24 | VK1-39 | 23 | 32 |
| ADI-20986 | Site 0 | 0.000 | VH3-7 | VK3-20 | 9 | 6 |
| ADI-20987 | Unknown | 0.000 | VH3-33 | VK3-20 | 7 | 2 |
| ADI-20988 | Site V | 0.000 | VH1-18 | VK2-30 | 12 | 3 |
| ADI-20989 | Site I | 0.000 | VH4-4 | VK1-39 | 9 | 9 |
| ADI-20990 | Site I | 0.000 | VH3-30 | VK2-28 | 16 | 4 |
| ADI-20991 | Site III | 0.022 | VH3-11 | VL1-40 | 8 | 2 |
| ADI-20992 | Site V | 0.000 | VH3-7 | VK1-39 | 9 | 6 |
| ADI-20993 | Site I | 0.135 | VH3-30 | VK2-28 | 13 | 7 |
| ADI-20994 | site IV | 0.020 | VH1-18 | VL3-21 | 16 | 3 |
| ADI-20995 | Unknown | 0.000 | VH5-51 | N/A | 9 | 0 |
| ADI-20996 | Site I | 0.015 | VH2-70 | VK1-39 | 3 | 8 |
| ADI-20997 | Site I | 0.000 | VH3-30 | VK3-20 | 14 | 9 |
| ADI-20998 | Site 0 | 0.109 | VH3-30 | VL2-11 | 9 | 5 |
| ADI-20999 | Unknown | 0.088 | VH4-39 | VL1-51 | 15 | 5 |
| ADI-21000 | Site I | 0.000 | VH2-26 | VK1-39 | 12 | 4 |
| ADI-21001 | Site IV | 0.000 | VH4-39 | VK4-1 | 10 | 1 |
| ADI-21002 | Site I | 0.010 | VH4-4 | VK1-39 | 16 | 7 |
| ADI-21003 | Site IV | 0.000 | VH4-34 | VK2-28 | 4 | 2 |
| ADI-21004 | Site IV | 0.000 | VH3-33 | VK4-1 | 8 | 12 |
| ADI-21005 | Unknown | 0.000 | VH3-43 | VK3-20 | 16 | 6 |
| ADI-21006 | Site III | 0.000 | VH2-5 | VK2-30 | 6 | 8 |
| ADI-21007 | Site IV | 0.082 | VH1-46 | VL6-57 | 12 | 3 |
| ADI-21008 | Site I | 0.000 | VH4-34 | VK3-11 | 15 | 2 |
| ADI-21009 | Unknown | 0.040 | VH1-18 | VL2-23 | 20 | 9 |
| ADI-21010 | Site III | 0.000 | VH3-33 | VK1-5 | 15 | 6 |
| ADI-21011 | Site I | 0.109 | VH4-59 | VK1-39 | 23 | 9 |
| ADI-21012 | Site I | 0.018 | VH2-70 | VK1-39 | 7 | 7 |
| ADI-21013 | Site V | 0.000 | VH4-39 | VK3-20 | 13 | 6 |
| ADI-21014 | Site 0 | 0.112 | VH4-59 | VK1-33 | 24 | 10 |
| ADI-21015 | Site IV | 0.000 | VH1-24 | VK1-39 | 15 | 4 |
| ADI-21017 | Site V | 0.000 | VH1-18 | VK2-30 | 8 | 4 |
| ADI-21018 | Site III | 0.031 | VH3-21 | VL1-40 | 8 | 5 |
| ADI-21019 | Site IV | 0.000 | VH3-23 | VK2-28 | 15 | 3 |
| ADI-21021 | Site IV | 0.000 | VH4-34 | VK1-5 | 10 | 11 |
| ADI-21022 | Unknown | 0.003 | VH4-59 | VL3-21 | 8 | 3 |
| ADI-21023 | Site III | 0.060 | VH3-21 | VL1-40 | 16 | 8 |
| ADI-21025 | Site III | 0.033 | VH3-21 | VL1-40 | 11 | 4 |
| ADI-21026 | Site I | 0.225 | VH4-31 | VK4-1 | 9 | 7 |
| ADI-21027 | Site III | 0.008 | VH4-4 | VL1-40 | 15 | 5 |
| ADI-21028 | Unknown | 0.000 | VH3-11 | VK1-5 | 10 | 10 |
| ADI-21029 | Unknown | 0.000 | VH5-51 | VK1-39 | 14 | 3 |
| ADI-21030 | Site III | 0.060 | VH3-11 | VL1-40 | 12 | 8 |
| ADI-21031 | Unknown | 0.004 | VH4-61 | VK3-11 | 21 | 7 |
| ADI-21032 | Site III | 0.054 | VH3-21 | VL1-40 | 14 | 5 |
| ADI-21033 | Site 0 | 0.000 | VH5-51 | VK1-33 | 20 | 8 |
| ADI-21034 | Site I | 0.015 | VH5-a | VK3-20 | 11 | 5 |
| ADI-21035 | Site I | 0.033 | VH1-18 | VK1-5 | 14 | 8 |
| ADI-21036 | Site I | 0.101 | VH5-51 | VL2-23 | 16 | 16 |
| ADI-21037 | Site I | 0.122 | VH3-30 | VK2-28 | 13 | 4 |
| ADI-21038 | Site I | 0.000 | VH5-51 | VK3-20 | 15 | 1 |
| ADI-21039 | Site I | 0.102 | VH1-46 | VK2-28 | 11 | 0 |
| ADI-21040 | Unknown | 0.046 | VH4-4 | VL1-40 | 14 | 6 |
| ADI-21041 | Unknown | 0.000 | VH3-43 | VK1-39 | 3 | 3 |
| ADI-21042 | Site I | 0.000 | VH4-31 | VK1-5 | 18 | 7 |
| ADI-21043 | Site I | 0.059 | VH1-18 | VL3-21 | 8 | 4 |
| ADI-21044 | Unknown | 0.000 | VH5-51 | VK1-39 | 16 | 6 |
| ADI-21045 | Site III | 0.032 | VH3-21 | VL1-40 | 18 | 5 |
| ADI-21046 | Site IV | 0.089 | VH5-51 | VL1-40 | 16 | 7 |
| ADI-21047 | Site IV | 0.000 | VH4-34 | VK1-33 | 14 | 4 |
| ADI-21048 | site IV | 0.087 | VH1-18 | VL3-21 | 8 | 3 |
| ADI-21049 | Site III | 0.102 | VH3-21 | VL1-40 | 7 | 3 |
| ADI-21050 | Site V | 0.000 | VH1-18 | VK2-30 | 10 | 7 |
| ADI-21051 | Unknown | 0.000 | VH4-61 | VK3-11 | 14 | 6 |
| ADI-21052 | site IV | 0.085 | VH1-18 | VL3-21 | 2 | 3 |
| ADI-21053 | Site I | 0.027 | VH4-31 | VK1-39 | 37 | 1 |
| ADI-21054 | Site IV | 0.000 | VH3-30 | VK1-5 | 21 | 9 |
| ADI-21055 | Site I | 0.110 | VH3-33 | VL1-44 | 12 | 10 |
| ADI-21056 | Site III | 0.020 | VH3-21 | VL1-40 | 15 | 6 |
| ADI-21057 | Site 0 | 0.000 | VH5-51 | VK3-15 | 13 | 1 |
| ADI-21058 | Site III | 0.000 | VH4-304 | VK3-15 | 20 | 3 |
| ADI-21059 | Unknown | 0.000 | VH5-51 | VK1-39 | 14 | 8 |
| ADI-21060 | Site III | 0.105 | VH3-11 | VL1-40 | 26 | 6 |
| ADI-21061 | Site I | 0.084 | VH1-69 | VL2-14 | 22 | 8 |
| ADI-21062 | Site I | 0.000 | VH3-21 | VK1-39 | 20 | 9 |
| ADI-21063 | Site V | 0.000 | VH3-64 | VK1-39 | 7 | 3 |
| ADI-21064 | Site V | 0.000 | VH1-18 | VK2-30 | 16 | 3 |
| ADI-21065 | Unknown | 0.000 | VH3-23 | VK3-20 | 7 | 2 |
| ADI-21067 | Site IV | 0.000 | VH4-34 | N/A | 11 | 0 |
| ADI-21068 | Site III | 0.021 | VH4-4 | VL1-40 | 19 | 3 |
| ADI-21069 | site IV | 0.000 | VH1-18 | VL3-21 | 16 | 5 |
| ADI-21070 | Site II | 0.000 | VH3-23 | VK3-15 | 12 | 3 |
| ADI-21071 | Site I | 0.019 | VH3-33 | VK1-39 | 14 | 7 |
| ADI-21072 | Site III | 0.010 | VH3-21 | VL1-40 | 16 | 3 |
| ADI-21073 | Site I | 0.000 | VH3-48 | VK1-39 | 18 | 8 |
| ADI-21075 | Site III | 0.021 | VH3-21 | VL1-40 | 17 | 2 |
| ADI-21076 | Site III | 0.015 | VH3-21 | VL1-40 | 16 | 7 |
| ADI-21077 | Site III | 0.018 | VH3-11 | VL1-40 | 9 | 2 |
| ADI-21078 | Site III | 0.017 | VH3-11 | VL1-40 | 10 | 5 |
| ADI-21079 | Site III | 0.064 | VH3-11 | VL1-40 | 5 | 1 |
| ADI-21080 | Site III | 0.006 | VH3-11 | VL1-40 | 16 | 2 |
| ADI-21081 | Site III | 0.031 | VH3-11 | VL1-40 | 12 | 5 |
| ADI-21082 | Site III | 0.004 | VH3-21 | VL1-40 | 13 | 5 |
| ADI-21083 | Site 0 | 0.101 | VH4-4 | VL2-11 | 12 | 6 |
| ADI-21084 | site IV | 0.100 | VH1-18 | VL3-21 | 19 | 6 |
| ADI-21085 | Site III | 0.167 | VH3-21 | VL1-40 | 9 | 6 |
| ADI-21086 | Site III | 0.024 | VH3-11 | VL1-40 | 16 | 4 |
| ADI-21087 | Unknown | 0.000 | VH3-48 | VK1-5 | 7 | 1 |
| ADI-21089 | Site III | 0.065 | VH3-21 | VL1-40 | 11 | 3 |
| ADI-21090 | Site IV | 0.000 | VH3-11 | VK3-15 | 28 | 6 |
| ADI-21091 | Site I | 0.005 | VH5-a | VL1-51 | 13 | 6 |

[0227] Analysis of the relationship between binding affinity and neutralization potency demonstrated that the majority of highly potent neutralizing antibodies bound with high apparent affinity to preF (K_{D}<1.0 nM) and failed to bind to postF (FIG. 3D). In addition, although approximately 20% of the neutralizing antibodies isolated from infants ≥6 mo. recognized both preF and postF, this type of neutralizing antibody was very rare in infants <3 mo. (FIGS. 3D and 4B), demonstrating that nearly all neutralizing antibodies in very young infants are preF-specific.

[0228] Next, the polyreactivity of the infant antibodies was assessed using a previously described assay (Jain et al., 2017; Kelly et al., 2015; Xu et al., 2013). Although the fraction of medium-to-highly polyreactive antibodies was relatively low (≤15%) for all infants, there was a higher frequency of polyreactive antibodies in the infants <3 mo. compared to the infants ≥6 mo. (FIG. 5A). This result could be related to differences in tolerance mechanisms in these two infant populations or to the higher frequency of antibodies containing little to no SHM in the younger infants. In support of the latter hypothesis, stratification of the antibodies based on their SHM levels showed that 12% of antibodies that lacked SHM displayed medium-to-high levels of polyreactivity, compared with only 2% of antibodies that contained >5 VH gene substitutions (FIG. 5B). This result is consistent with a prior study showing that the process of affinity maturation can result in decreased polyreactivity of human antibodies (Reed et al., 2016).

Infant Antibody Responses are Focused Primarily on Two Antigenic Sites that have Different Neutralization Sensitivity

[0229] To define the epitopes targeted by the infant antibodies, each antibody was tested for competition with other known RSV F-specific antibodies and assigned to an antigenic site based on the resulting competition profile (FIGS. 6A and 6B). In the three youngest infants, responses were dominated by antibodies directed against site III, whereas in the other infants, a larger proportion of the responses were directed against site I, and in some cases site IV (FIG. 6B). The proportion of antibodies recognizing preF-specific sites Ø and V at the apex of the preF molecule was low, particularly in the three youngest infants. Interestingly, analysis of the VH and VL germline gene usage for the site I-directed antibodies revealed that over 25% of the antibodies that recognized site I utilized the VK1-39 light chain gene (FIG. 7A). Although these site I-directed antibodies utilized a variety of VH genes, many possessed a convergent CDR H3 motif, generated from recombination of the DH3-22 and JH-4 genes (FIG. 7C). In contrast, nearly 85% of antibodies that recognized site III utilized either the VH3-21/VL1-40 or the related VH3-11/VL1-40 germline gene pairing (FIG. 7B) and did not show evidence of a convergent CDR H3 sequence.

[0230] The majority of site III-directed antibodies were preF-specific and neutralizing, whereas antibodies that recognized site I preferentially bound to postF and tended to be weak or non-neutralizing (FIGS. 6C, 7D, and 7E). In infants <3 mo., 60% of antibodies that displayed highly potent neutralizing activity (IC₅₀<0.05 ug/ml) were directed against site III (FIG. 6C). Therefore, although antibodies against both sites I and III are readily elicited during natural RSV infection in infants, site III-directed antibodies can potently neutralize RSV whereas site I-directed antibodies are typically non-neutralizing.

### Site III-Directed Antibodies can Potently Neutralize RSV in the Absence of SHM and are Present in the Naïve B Cell Repertoire

[0231] Next, the epitope specificities of the neutralizing antibodies that lacked SHM were analyzed (FIG. 8A). Of the 33 germline antibodies that displayed RSV-neutralizing activity, 27 targeted antigenic site III. Analysis of the index sort data revealed that approximately half of these antibodies originated from naïve B cells (IgG⁻IgA⁻CD27⁻) and the other half originated from memory B cells that expressed IgG, IgA, or CD27 (FIG. 8B). The identification of neutralizing site III-directed antibodies from B cells that lacked both SHM and classical memory B cell markers led to an investigation of the occurrence of these antibody specificities in the naïve B cell repertoire. Therefore, 112 and 19 antibodies from RSV F-reactive cord blood B cells and adult naïve B cells, respectively, were cloned and expressed. Due to the low affinity of naïve B cell-derived antibodies, only 22/112 (20%) antibodies sorted from cord blood and 9/19 (47%) antibodies from adult naïve B cells bound with measurable affinity to RSV F as full-length IgGs. However, 11/22 (50%) and 7/9 (78%) of the RSV F binding antibodies from cord blood and adult naïve B cells, respectively, utilized VH3-21/VL1-40 or VH3-11/VL1-40 germline gene pairing (FIG. 8C). Of these 18 antibodies, the 13 with binding affinities that allowed for analysis in a competition assay were all shown to recognize antigenic site III (Table 3). Antibodies derived from naïve B cells isolated from cord blood or the PMBCs of healthy adults were tested for competition with three control IgGs and displayed profiles consistent with recognition of antigenic site III. Results are expressed as the fold reduction in antigen binding in the presence of saturating concentrations of competitor Fab relative to an antigen-only control. N.D.; not determined due to low binding affinity.

TABLE 3
Naïve B cells that utilize the VH3-21/VL1-40
and VH3-11/VL1-40 gene pairs recognize site III

| | | Competitor Fab | | |
|---|---|---|---|---|
| | | D25 | MPE8 | Motavizumab |
| | | (Antigenic site ∅) | (Antigenic site III) | (Antigenic site II) |
| Control | D25 | 153 | 1 | 1 |
| IgGs | MPE8 | 1 | 228 | 20 |
| | Motavizumab | 1 | 1 | 39 |
| IgGs derived | ADI-32365 | 8 | 11 | 19 |
| from naïve | ADI-28517 | 11 | 23 | 55 |
| B cells | ADI-32361 | 7 | 50 | 169 |
| | ADI-32367 | 7 | 13 | 35 |
| | ADI-31917 | 3 | 69 | 190 |
| | ADI-31918 | 2 | 11 | 30 |
| | ADI-31919 | 1 | 55 | 159 |
| | ADI-28537 | 3 | 52 | 156 |
| | ADI-31921 | 3 | 37 | 112 |
| | ADI-32360 | 2 | 128 | 416 |
| | ADI-32362 | 3 | 117 | 370 |
| | ADI-32363 | 2 | 176 | 537 |
| | ADI-32366 | 3 | 61 | 10 |
| | ADI-28522 | N.D. | N.D. | N.D. |
| | ADI-31920 | N.D. | N.D. | N.D. |
| | ADI-28523 | N.D. | N.D. | N.D. |
| | ADI-28526 | N.D. | N.D. | N.D. |
| | ADI-28527 | N.D. | N.D. | N.D. |

[0232] The apparent binding affinities of these antibodies for preF were relatively high, ranging from 1.0-60 nM (FIG. 8C). In addition, approximately 40% of these site-III directed antibodies displayed neutralizing activity, with IC₅₀s ranging from 1.5-4.0 μg/mL (FIG. 8C). In contrast, none of the naïve B cell-derived antibodies that utilized other germline gene combinations showed detectible neutralizing activity (FIG. 8C). Collectively, these results indicate that site III-directed antibodies can neutralize RSV in the absence of SHM and that these types of antibodies are present in the naïve B cell repertoire.

A Site I-Directed Non-Neutralizing Antibody Recognizes postF Using a Convergent CDR H3 Motif and Germline-Encoded Regions of the VK1-39 Light Chain

[0233] The structure of a site I-directed antibody, ADI-14359, in complex with postF was characterized to define the molecular determinants of the convergent antibody features (FIG. 9A) (Table 4).

TABLE 4
Crystallographic data collection and refinement statistics

| | | | Prefusion RSV F + |
|---|---|---|---|
| | Postfusion RSV F + | ADI-19425 | ADI-19425 Fab + |
| | ADI-14359 Fab | Fab | AM22 Fab |
| PDB ID | 6APB | 6APC | 6APD |
| Data collection | | | |
| Space group | P2₁2₁2₁ | P2₁2₁2₁ | P4₁2₁2 |
| Cell constants | | | |
| a, b, c (Å) | 88.5, 99.0, 323.3 | 61.2, 66.5, 126.0 | 229.5, 229.5, 304.1 |
| α, β, γ (°) | 90, 90, 90 | 90, 90, 90 | 90, 90, 90 |
| Wavelength (Å) | 1.1809 | 0.9792 | 0.9793 |
| Resolution (Å) | 51.1-3.0 (3.08-3.00) | 26.1-1.7 (1.73-1.70) | 50.9-4.1 (4.20-4.10) |
| Unique reflections | 57,978 (4,439) | 57,347 (2,940) | 64,175 (4,439) |
| R_{merge} | 0.449 (1.662) | 0.069 (0.328) | 0.364 (1.545) |
| Rₚᵢₘ | 0.177 (0.650) | 0.028 (0.153) | 0.108 (0.443) |
| I/σI | 5.2 (1.6) | 16.8 (4.2) | 6.3 (1.9) |
| CC_{1/2} | 0.952 (0.564) | 0.998 (0.930) | 0.995 (0.609) |
| Completeness (%) | 100.0 (100.0) | 99.9 (99.4) | 99.9 (100.0) |
| Redundancy | 7.3 (7.4) | 6.8 (5.5) | 12.2 (13.0) |
| Wilson B-factors | 11.5 | 29.4 | 117.9 |
| Refinement | | | |
| Resolution (Å) | 51.1-3.0 (3.05-3.00) | 26.1-1.7 (1.73-1.70) | 50.9-4.1 (4.16-4.10) |
| Unique reflections | 57,820 (2,724) | 57,181 (2,645) | 64,084 (2,497) |
| R_{work}/R_{free} (%) | 22.0/25.3 | 17.4/20.4 | 20.9/26.1 |
| No. atoms | | | |
| Protein | 13,264 | 3,233 | 30,005 |
| Ligand/ion | 42 | 10 | — |
| Water | — | 692 | — |
| B-factors | | | |
| Protein | 37.2 | 15.9 | 167.2 |
| Ligand/ion | 76.5 | 21.3 | — |
| Water | — | 30.2 | — |
| R.m.s. deviations | | | |
| Bond lengths (Å) | 0.004 | 0.003 | 0.003 |
| Bond angles (°) | 0.91 | 0.667 | 0.632 |
| Ramachandran | | | |
| Favored (%) | 95.9 | 97.5 | 95.1 |
| Allowed (%) | 3.8 | 2.1 | 4.7 |
| Outliers (%) | 0.4 | 0.5 | 0.2 |

Values in parentheses are for the highest-resolution shell.

[0234] The structure revealed that the CDR H3, generated from the convergent usage of DH3-22/JH-4, is inserted into a small groove near the top of the postF trimer (FIG. 9B) and makes a number of hydrogen bonds with postF residues in and around this groove (FIG. 9C). CDR H3 residues Tyr100c and Tyr100d (Kabat numbering), which are uncommon in D genes other than DH3-22, form hydrogen bonds with postF residues Glu31 and Glu378, respectively, which are located on the ridge surrounding the site I groove. The tip of the CDR H3 loop is composed of three small amino acids that allow the loop to fit into the groove and make hydrogen bonds with residues Lys42, Asp344, and Asn380 of postF. These small residues also allow the CDR H3 to stack against Trp314, which is positioned at the floor of the groove. In addition, ADI-14359 heavy chain residue Tyr100g, which is unique to the JH4 gene, stacks against Tyr49 in the light chain, which may help properly orient the CDR H3.

[0235] Antibodies that utilized this convergent CDR H3 also showed a strong bias towards pairing with the VK1-39 light chain gene. Several germline-encoded residues within CDR L1 and the framework region 3 of VK1-39 form hydrogen bonds with Glu31 on postF (FIG. 9C). In addition, Tyr92 at the start of the CDR L3 is a unique feature of VK1-39, and forms a hydrogen bond with Ser35 on the F₂ subunit of postF. The light chain of ADI-14359 is predicted to clash substantially with β22 of preF, which rearranges during the transition to postF to allow formation of the six-helix bundle (FIG. 10). Therefore, preferential binding to postF by this type of antibody is mediated by the light chain.

[0236] Although site I-directed antibodies did not show convergent VH gene usage, the heavy chain utilized by ADI-14359 also makes critical interactions with postF (FIG. 9C). The only residue that is mutated from germline in ADI-14359, Arg50, forms a salt bridge with Asp52 in the CDR H2 and appears to assist in coordinating the electrpostatic interaction between Asp52, Asp56 and Asp58 of the CDR H2 with Lys390 on postF. Arg50 also forms a hydrogen bond with light chain residue Tyr96, a residue that is unique to the IGK-J2 gene utilized by ADI-14359. To investigate the contribution of these VH gene-mediated interactions to binding, the binding affinity of ADI-14359 Fab and the germline reverted variant (R50L) to postF was measured using surface plasmon resonance (SPR). This analysis revealed that the affinity of the germline reverted variant was reduced by more than 30-fold (FIG. 9D). Also, it was found that substitution of Lys390 on postF with alanine (K390A) almost entirely ablated ADI-14359 binding (FIG. 9D). The presence of three acidic residues in the CDR H2 therefore appears to be critical for the interaction of ADI-14359 with postF. However, the contribution of the CDR H2 to binding may vary among other members of this group, since many of the VH germlines utilized lack this acidic motif.

A Site III-Directed Neutralizing Antibody Utilizes Germline-Encoded Features of the VH3-21 and VL1-40 Genes for High-Affinity Recognition of preF

[0237] To investigate the molecular basis of preferential germline gene pairing in antibodies targeting site III, the crystal structure of ADI-19425 bound to a preF-stabilized variant of RSV F (PR-DM) was determined (FIGS. 11A and 12A, Table 4) (Krarup et al., 2015). This antibody, which was isolated from a 2.8-month old infant, showed potent neutralizing activity despite lacking SHM (Table 2, FIG. 12B). The structure revealed that the majority of contacts between ADI-19425 and preF are formed by the light chain, particularly Tyr31 in CDR L1 and Tyr91 in CDR L3, both of which contact the loop connecting α6 to α7 (FIG. 11B). Tyr91 is the only residue in the CDR L3 that directly interacts with F, although contacts between Asp94 and Ser96 may play a role in positioning this loop and preventing a steric clash between ADI-19425 and antigenic site II (α6-α7) of RSV F. Consistent with the structural analysis, substitution of Tyr31 or Tyr91 with alanine resulted in greater than 20- or 80-fold reductions in affinity, respectively, as measured by SPR (FIG. 11C).

[0238] In addition to the contacts formed by the light chain, CDR H2 contains a stretch of five consecutive serine residues that form a network of hydrogen bonds with Asp310 on (36 of preF. Notably, the VH3-11 germline gene, which has 92% sequence identity with VH3-21, was utilized by site III-directed antibodies at a much lower frequency than VH3-21 (11% compared with 76%). One explanation for this could be the presence of a tyrosine residue directly following the polyserine motif in VH3-21, but not VH3-11. The structure shows that this residue (Tyr56) is buried in a small groove neighboring antigenic site II (FIG. 11B). Consistent with these observations, substitution of Tyr56 with alanine resulted in a more than 150-fold decrease in affinity (FIG. 11C). Interestingly, although the VH3-48 germline gene also contains the polyserine motif and is present in the naïve B cell repertoire at approximately the same frequency as VH3-11 (DeKosky et al., 2013), only a single site III-directed antibody (ADI-19440) that utilizes VH3-48/VL1-40 was isolated (see Table 2).

[0239] The structure also shows that Tyr56 of ADI-19425 is buried in a small groove neighboring antigenic site II on preF (FIG. 11B). Consistent with these observations, substitution of Tyr56 with alanine resulted in a more than 150-fold decrease in affinity (FIG. 11C).

[0240] In contrast to the clear VH- and VL-specific features highlighted above, there were fewer restrictions on the sequences of the CDR H3s of site III antibodies, and sequence analysis demonstrated that the CDR H3s varied in length, with some preference towards usage of glycine, serine and tyrosine residues at positions 96-100c (FIG. 7C). The structure reveals that although the ADI-19425 CDR H3 buries approximately 250 Å of preF, it does not form hydrogen bonds or salt bridges with either protomer (FIG. 11B). Notably, the cross-neutralizing antibody MPEG, which has recently been structurally characterized (Wen et al., 2017), utilizes the VH3-21 and VL1-40 germline gene pair to recognize site III with a binding mode nearly identical to that of ADI-19425, despite substantial differences in the sequences of the two CDR H3s (FIGS. 12C and 12D). This is consistent with our observation that multiple CDR H3 sequences can be utilized by this family of antibodies to recognize preF.

### Discussion

[0241] Although RSV causes substantial mortality in infants, little is known about the specificities and functional characteristics of the infant antibody response to natural RSV infection. Here, it is shown that infant antibody responses to RSV F differ substantially from those of healthy adults, not only in affinity and neutralization potency, but also in the patterns of epitope recognition. The infant responses were focused on two major regions of the RSV F trimer—antigenic sites I and III—neither of which are dominant in adult responses (Gilman et al., 2016). These differences were the most extreme in infants under three months of age, with infants older than six months exhibiting responses that began to resemble healthy adults. This observation is consistent with previous studies showing that the infant immune system begins to mature at around six months of age, but does not attain stable, adult-like characteristics until later in life, at around six years of age (IJspeert et al., 2016; Ridings et al., 1998).

[0242] The majority of antibodies that recognized antigenic site III utilized the same VH and VL germline gene pairing, but were not restricted in D- and J-gene usage. Importantly, a subset of these antibodies showed potent neutralizing activity despite containing little to no SHM. Approximately half of these antibodies were derived from memory B cells and the other half were derived from B cells that lacked surface expression of CD27, IgG and IgA, suggesting that they originated from naïve B cells. Recent work has shown that polyclonal IgM antibodies purified from RSV naïve infant sera are capable of neutralizing RSV and it was suggested that these antibodies may represent natural anti-RSV antibodies that react with the N- and O-linked glycans present on the RSV surface glycoproteins (Jans et al., 2016). However, unlike natural IgM antibodies—which rely on avidity, typically recognize common surface antigens, and exhibit some degree of polyreactivity (Panda and Ding, 2015)—the site III-directed antibodies described here bind with high affinity in an IgG backbone, specifically recognize an epitope on RSV F that lacks N-linked glycans, and generally show limited polyreactivity, suggesting that they are distinct from previously described natural antibodies. In addition, the presence of this class of antibodies in the memory compartment of older infants and adults indicates that these B cells can be activated in response to antigen exposure and undergo affinity maturation. Similar germline-mediated recognition in the adaptive immune response has also been described for other viral pathogens, including influenza (Ekiert et al., 2009; Kashyap et al., 2008; Sui et al., 2009; Throsby et al., 2008), hepatitis C virus (Bailey et al., 2017) and human cytomegalovirus (Thomson et al., 2008), and for bacterial pathogens such as Staphylococcus aureus (Yeung et al., 2016). The presence of functional germline antibodies in the human antibody repertoire has been proposed to serve as a type of innate humoral response to life-threatening pathogens that are likely to be encountered early in life (Lerner, 2011). The isolation of this class of antibodies from all seven infants studied here, as well as from cord blood B cells, adult naïve B cells, and memory B cells from previously characterized adult donors (Gilman et al., 2016), suggests that the naïve B cell precursors encoding these antibody specificities are likely present in most individuals. The results suggest that expansion of these cells may be a feasible goal for infant vaccination strategies (in contrast to, e.g., certain types of HIV-neutralizing antibodies, whose inferred germline precursors display limited reactivity with native HIV Env antigens only develop in a subset of HIV-1 infected individuals, and require complex vaccination strategies to elicit (Dona-Rose et al., 2010; Gray et al., 2011; Jardine et al., 2016; Sather et al., 2009; Simek et al., 2009; Sok et al., 2016; Yacoob et al., 2016)).

[0243] Antibody responses directed specifically against preF are associated with potent neutralization of RSV in human sera (Magro et al., 2012; Ngwuta et al., 2015), and monoclonal antibodies that bind exclusively to preF have been shown to be substantially more potent than antibodies that recognize both preF and postF (Corti et al., 2013; Gilman et al., 2016; Gilman et al., 2015; McLellan et al., 2013; Mousa et al., 2017). Interestingly, neutralizing antibodies that react with both preF and postF were identified in healthy adults and infants over 6 months old, but were almost entirely absent in the youngest infants analyzed here. Although postF antigens are capable of eliciting neutralizing antibodies that also bind to preF, their inability to elicit preF-specific antibodies would likely prove problematic for use in a young infant population. In addition, our results show that a large fraction of the infant antibody response (15-30%) is directed against antigenic site I, which is preferentially expressed on postF. Since antibodies targeting this site generally showed poor neutralizing activity, vaccination with a postF antigens could drive infant antibody responses toward ineffective recognition of RSV F. Recently, it was shown that formalin inactivated RSV (FI-RSV), the preparation that resulted in vaccine-enhanced disease when administered to infants in the 1960s, displays an abundance of postF on the surface of the virus (Killikelly et al., 2016). Although many factors contribute to the development of vaccine-enhanced disease (Acosta et al., 2015), the high abundance of postF on FI-RSV could result in the induction of high levels of site I-directed antibodies and a low fraction of neutralizing antibodies, which are properties previously associated with the formation of immune complexes that contribute to lung pathology in vaccine-enhanced illness (Murphy and Walsh, 1988; Polack et al., 2002).

[0244] An age-dependent increase in the response against antigenic sites Ø and V, which are both present near the apex of the preF trimer, was also observed. Although infant antibodies that targeted these epitopes tended to be potently neutralizing, they were present at low abundance in the responses analyzed here, particularly in infants under three months of age. These data suggest that although the presence of site Ø is likely important for generating neutralizing antibody responses later in life, eliciting a neutralizing response in young infants will likely depend on the presentation of antigenic site III. The observed differences in the dominant epitopes targeted by infant and adult responses provides a unique opportunity for prevention strategies that seek to combine passive and active immunization. For example, vaccines could be designed to preferentially elicit site III antibodies, which would not compete for binding with certain second-generation prophylactic antibodies that target antigenic site 0, such as MEDI8897. In addition, antibodies elicited by a site-III-specific vaccine would not block access to the apex of the preF trimer on infectious virions, allowing the development of neutralizing antibodies directed against antigenic sites in this region to occur during natural RSV infection.

### Materials & Methods

### Human Subjects

[0245] Families of infants were approached at the time of hospitalization for documented RSV infection. At that point a Dartmouth Committee for the Protection of Human Subjects approved consent was signed to obtain 5-10 cc of blood approximately 1 month after discharge from the Children's Hospital at Dartmouth (CHaD). Families were contacted at the planned time for phlebotomy and arrangements made for blood to be drawn either at CHaD or at a medical facility closer to their home.

### Plasma Neutralization Titers

[0246] Infant plasma samples were tested for RSV neutralization in microtiter assays using an RSV construct containing green fluorescent protein (GFP) and luciferase reporter genes (RSV-GFP1-Luc2, ViraTree). Hep2 cells were added to 96-well plates at a density of 1.8×10⁴ cells per well in 100 μL of MEM with 2% FBS/1× penicillin-streptomycin solution (2% MEM) and allowed to adhere overnight at 37° C. On the day of the assay, plasma samples were serially diluted two-fold (1:4 to 1:128,000) in 2% MEM containing RSV-GFP1-Luc2 and incubated for 1 hr at 37° C. Culture media was aspirated from the Hep2 cells followed by the addition of 100 μL/well of the plasma-RSV-GFP1-Luc2 mixture to triplicate wells. Cultures were maintained at 37° C. for 24 hrs and luciferase expression was quantified in cell lysates using the Renilla-Glo® assay system (Promega). Relative light units (RLU) were measured on a BioTek Synergy 2 microplate reader. Neutralization is expressed as the reciprocal of the highest plasma dilution to yield a 60% reduction in RLU as compared to control wells with no added plasma

### Production of RSV F Sorting Probes

[0247] To generate sorting probes with high avidity, and uniformly oriented F proteins, preF (DS-Cav1) and postF (F ΔFP) trimers with a single biotinylated C-terminal AviTag were produced before coupling to streptavidin-PE or -APC (Gilman et al., 2016).

Single B-Cell Sorting from Infants Less than 3 Months of Age

[0248] Peripheral blood mononuclear cells from RSV-infected infants were stained using anti-human IgG (BV605), IgA (FITC), CD27 (BV421), CD8 (PerCP-Cy5.5), CD14 (PerCP-Cy5.5), CD19 (PECy7), CD20 (PECy7) and a mixture of dual-labeled preF and postF tetramers (50 nM each). For naïve B cell sorting, cord blood or peripheral blood mononuclear cells were stained with anti-human IgG (BV605), IgM (FITC), CD27 (BV421), CD8 (PerCP-Cy5.5), CD14 (PerCP-Cy5.5), CD19 (PECy7), CD20 (PECy7) and a mixture of dual-labeled preF and postF tetramers (50 nM each). Tetramers were prepared fresh for each experiment. Single cells were sorted on a BD fluorescence-activated cell sorter Aria II into 96-well PCR plates (BioRad) containing 20 μL/well of lysis buffer [5 μL of 5× first strand cDNA buffer (Invitrogen), 0.25 μL RNaseOUT (Invitrogen), 1.25 μL dithiothreitol (Invitrogen), 0.625 μL NP-40 (New England Biolabs), and 12.6 μL dH2O]. Plates were immediately frozen on dry ice before storage at −80° C.

### Amplification and Cloning of Antibody Variable Sequences

[0249] Single B cell PCR and cloning were performed as described previously (Gilman et al., 2016). Briefly, antibody variable genes were amplified by RT-PCR and PCR reactions using cocktails of IgG⁻ and IgA⁻ specific primers and then cloned into S. cerevisiae using the lithium acetate method for chemical transformation (Gietz and Schiestl, 2007). Transformation reactions contained 20 μL of unpurified heavy chain and light chain PCR product and 200 ng of digested heavy and light chain plasmids. After transformation, yeast cells were plated and individual yeast colonies were picked for sequencing and characterization.

### Production of Full-Length Human Antibodies

[0250] Anti-RSV F IgGs were expressed in S. cerevisiae as described previously (Gilman et al., 2016). Briefly, S. cerevisiae cultures were grown in 24-well plates, and after six days of growth the yeast culture supernatants were harvested by centrifugation and purified over protein A.

### High-Throughput Antibody Affinity Measurements

[0251] IgG binding affinities for preF and postF were determined by BLI measurements as described previously (Gilman et al., 2016).

### Antibody Competition Experiments

[0252] Antibody competition assays were performed as previously described (Gilman et al., 2016). The degree of competition was analyzed by measuring the fold reduction in antigen binding in the presence of competitor Fab relative to an antigen-only control. Antibodies that showed a greater than five-fold reduction in binding in the presence of competitor Fab were considered competitors.

### Polyreactivity Assay

[0253] Antibody polyreactivity was performed essentially as described previously (Jain et al., 2017). Yeast-expressed IgGs were incubated with biotinylated CHO cell membrane preparations and incubated on ice for 20 minutes. Cells were then washed and re-suspended in secondary antibody mix (Extravidin-R-PE, anti-human LC-FITC, and propidium iodide). The mixture was incubated on ice for 20 minutes and then washed twice with PBSF. Cells were then re-suspended in PBSF and run on a FACSCanto II (BD Biosciences). The mean fluorescence intensities of binding were normalized using control antibodies that display high, medium, or low polyreactivity to assess non-specific binding.

### High-Throughput Fluorescence Plate Reader Neutralization Assay

[0254] A total of 2.4×10⁴ HEp-2 cells/well in 30 μL culture medium were seeded in 384-well black optical-bottom plates (Nunc®384-well plates, Thermo Scientific). Antibodies were diluted four-fold starting at 100 μg/mL. An equal volume of recombinant mKate-RSV A2 or mKate-RSV B 18537 was then added and incubated at 37° C. for 1 hour. After incubation, 50 μl of the antibody-virus mixture was added to the HEp-2 cells and incubated at 37° C. for 22-24 hours. After incubation, the fluorescence intensity of each well was measured using a microplate reader at an excitation of 588 nm and an emission of 635 nm (SpectraMax Paradigm). Neutralization IC₅₀s were calculated using GraphPad Prism (GraphPad Software Inc.).

### Production of ADI-14359, ADI-19425, and AM22 Fabs and Variants

[0255] Plasmids encoding the heavy and light chains of ADI-14359, ADI-19425 or AM22 were co-transfected at a 1:1 ratio into Expi293F cells. Point mutants were generated using MegaPrimer PCR and were expressed in FreeStyle 293-F cells. Fabs were purified using CaptureSelect IgG-CH1 affinity matrix (Life Technologies) and were further purified by size-exclusion chromatography on a Superdex 200 column (GE Healthcare).

### Production of Protein Complexes for Crystallization

[0256] A mammalian expression vector encoding RSV F ΔFP (postF) with a C-terminal HRV 3C cleavage site, 8X HisTag and StrepTagII was transfected into FreeStyle 293-F cells and 5 μM kifunensine was added approximately 4 hours after transfection. The secreted protein was purified using Strep-Tactin resin (IBA), then treated with 10% (wt/wt) EndoH to remove N-linked glycans, followed by 10 U/mg of HRV 3C to remove tags. The protein was then purified by size-exclusion chromatography using a Superdex 200 column (GE) in buffer containing 2 mM Tris pH 8, 200 mM NaCl and 0.02% NaN₃.

[0257] To produce the ADI-14359 Fab-postF complex, purified F ΔFP was combined with a 1.5-fold molar excess of ADI-14359 Fab and incubated at room temperature for approximately 30 minutes. Excess Fab was separated from the complex by size-exclusion chromatography using a Superose 6 column (GE Healthcare Biosciences) in buffer containing 2 mM Tris pH 8, 200 mM NaCl and 0.02% NaN₃. The complex eluted with a retention volume indicative of a complex with 1-2 Fabs bound per postF trimer, suggesting that ADI-14359 Fab may bind sub-stoichiometrically to postF.

[0258] To produce the ADI-19425-AM22-preF ternary complex, purified PR-DM was combined with a 1.5-fold molar excess of both ADI-19425 Fab and AM22 Fab. Binding took place at room temperature for roughly 30 minutes before the ternary complex and excess Fab were separated by size-exclusion chromatography using a Superdex 200 column (GE Healthcare) in 2 mM Tris pH 8, 200 mM NaCl and 0.02% NaN₃.

### Crystallization and Data Collection

[0259] The ADI-14359 Fab-postF complex was crystallized by the hanging-drop vapor-diffusion method by mixing 1.33 μL of protein at a concentration of 4.45 mg/mL with 0.67 μL of reservoir solution composed of 13% polyethylene glycol (PEG) 8000 and 0.43 M ammonium citrate pH 8.5. Cryo-preservation was performed by hanging the looped crystal over a 1 M sodium chloride solution for approximately 2 minutes prior to plunge freezing in liquid nitrogen. Data were collected to 3.0 Å resolution at SSRL (Stanford Synchrotron Radiation Lightsource, National Accelerator Laboratory).

[0260] The unbound ADI-19425 Fab was initially crystallized using the sitting-drop vapor-diffusion method using 50 nL protein at 8.78 mg/ml and 100 nL reservoir solution containing 2.0 M ammonium sulfate and 0.1 M HEPES pH 7.5. These crystals were used to generate a seek solution and the final crystals were obtained using 50 nL protein at 8.78 mg/ml, 50 nL seed solution and 100 nL reservoir solution containing 1.5 M ammonium sulfate, 0.1 M sodium chloride, and 0.1 M Bis-Tris pH 6.5. Crystals were soaked in a solution of reservoir containing a final concentration of 2.5 M ammonium sulfate before being frozen in liquid nitrogen. Data were collected to 1.7 Å resolution at the SBC beamline 19-ID (Advanced Photon Source, Argonne National Laboratory).

[0261] The ADI-19425-AM22-preF ternary complex was crystallized by the sitting-drop vapor-diffusion method using 100 nL of protein solution at a concentration of 4.80 mg/mL and 100 nL of reservoir solution containing 0.1 M sodium citrate pH 5.5, 10% isopropanol and 10% PEG 4000. Crystals were soaked in a cryoprotectant solution containing reservoir solution plus 15% 2R,3R-butanediol before being frozen in liquid nitrogen. Data were collected to 4.3 Å at the SBC beamline 19-ID (Advanced Photon Source, Argonne National Laboratory).

### Structure Determination, Model Building and Refinement

[0262] Diffraction data were indexed and integrated using iMOSFLM (Battye et al., 2011) and merged and scaled with AIMLESS (Evans and Murshudov, 2013). Molecular replacement solutions were obtained with PHASER (McCoy et al., 2007) and the structures were refined using PHENIX (Adams et al., 2002) and built manually using Coot (Emsley and Cowtan, 2004). Software used for processing and visualization of X-ray diffraction data was curated by SBGrid and accessed using the CCP4i interface (Collaborative Computational Project, 1994; Morin et al., 2013; Potterton et al., 2003). Data collection and refinement statistics for the three crystal structures are presented in Table 2.

[0263] The ADI-14359-postF complex formed crystals in space group P2₁2₁2₁ and a molecular replacement solution was found using the previously solved postF structure (PDB ID: 3RRT), the heavy chain from 2D1 Fab (PDB ID: 3QHZ), and the light-chain from 5-51/012 Fab (PDB ID: 4KMT) as search models. The asymmetric unit contained one postF trimer with only one ADI-14359 Fab bound per trimer. The model was built manually in Coot and refined in PHENIX using non-crystallographic symmetry (NCS) and reference model restraints to an Rwork/Rfree of 22.0/25.3%.

[0264] The unbound ADI-19425 Fab also formed crystals in P2₁2₁2₁, and the heavy chain from MJ5 Fab (PDB ID: 3EYQ) and the light chain from LDLR competitive Fab (PDB ID: 3H42) were used as search models in molecular replacement. The structure was manually built in Coot and refined in PHENIX to an Rwork/Rfree of 17.4/20.4%. The ADI-19425-AM22-preF complex formed crystals in space group P4₁2₁2 and a molecular replacement solution was found using the refined structures of the unbound ADI-19425 Fab and the complex of preF bound to AM22 Fab as search ensembles. The asymmetric unit contained a single preF trimer bound by three molecules of AM22 Fab and three molecules of 19425 Fab. The model was built manually in Coot and refined in PHENIX using non-crystallographic symmetry (NCS) and reference model restraints to an Rwork/Rfree of 22.2/25.5%.

### Fab Affinity Measurements for ADI-14359, ADI-19425, and Variants

[0265] The affinity of ADI-14359 Fab for postF was measured using surface plasmon resonance (SPR). Purified postF (RSV F ΔFP) with a C-terminal HRV 3C cleavage site, 8X HisTag and StrepTagII was captured on the sample flow cell of an NTA sensor chip to approximately 115 RU per cycle using a Biacore X100 (GE Healthcare). The NTA chip was regenerated between each cycle with 0.35 M EDTA followed by 0.5 mM NiCl₂. A buffer-only reference sample (HBS-P+pH 8) was injected over both flow cells, followed by a 2-fold serial dilution of ADI-14359 Fab from 800 nM to 6.25 nM, starting with the lowest concentration, and a duplication of the 100 nM sample. The data were double-reference subtracted, then fit to a 1:1 binding model using Scrubber. Binding of ADI-14359 Fab to the postF K390A variant was measured in a similar manner, with capture of approximately 100 RU per cycle and injection of a buffer-only reference, followed by a 2-fold serial dilution of Fab from 1.6 μM to 6.25 nM, with a duplication of the 100 nM concentration. The data were double-reference subtracted, but the total response was too low to allow an affinity to be calculated. For the germline variant of ADI-14359 (R50L), approximately 115 RU of postF was captured on the NTA chip before injection of a buffer-only reference, followed by a 2-fold serial dilution of ADI-14359 R50L Fab from 20 μM to 78 nM. The data were double reference subtracted and fit using a steady-state affinity model in Scrubber.

[0266] Similar SPR experiments were performed to measure the binding between ADI-19425 Fab and preF. Purified preF (DS-Cav1) with a C-terminal 8X HisTag and AviTag was captured on the sample flow cell of an NTA sensor chip to approximately 150 RU. A buffer-only reference sample (HBS-P+pH 8.0) was injected over both the sample and reference flow cells, followed by a 2-fold serial dilution of ADI-19425 Fab from 40 nM to 1.25 nM, with a duplication of the 10 nM concentration. For the ADI-19425 Fab variants (heavy chain Y56A, light chain Y31A, and light chain Y91A), roughly 150 RU of preF was captured on the NTA chip before the injection of a buffer-only reference, followed by a 2-fold serial dilution of ADI-19425 Fab variant from 1000 nM to 31.25 nM, with a duplication of the 250 nM concentration. The data were double reference subtracted and fit using a 1:1 binding model in Scrubber.

### Data Resources

[0267] Antibody sequences will be deposited in GenBank. Atomic coordinates and structure factors for the 14359-postF complex structure, the unbound 19425 Fab, and the 19425-AM22-preF complex structure have been deposited with the Protein Data Bank under accession codes 6APB, 6APC, and 6APD.

### REFERENCES

[0268] All references cited herein including, without limitation, patents, patent applications, and non-patent references and publications referenced throughout, are hereby expressly incorporated by reference in their entireties for all purposes.
[0269] Acosta, P. L., Caballero, M. T. , and Polack, F. P. (2015). Brief History and Characterization of Enhanced Respiratory Syncytial Virus Disease. Clin Vaccine Immunol 23, 189-195.
[0270] Adams, P. D., Grosse-Kunstleve, R. W., Hung, L. W., Ioerger, T. R., McCoy, A. J., Moriarty, N. W., Read, R. J., Sacchettini, J. C., Sauter, N. K., and Terwilliger, T. C. (2002). PHENIX: building new software for automated crystallographic structure determination. Acta Crystallogr D Biol Crystallogr 58, 1948-1954.
[0271] Anderson, L. J., Dormitzer, P. R., Nokes, D. J., Rappuoli, R., Roca, A., and Graham, B. S. (2013). Strategic priorities for respiratory syncytial virus (RSV) vaccine development. Vaccine 31 Suppl 2, B209-215.
[0272] Anderson, L. J., Hierholzer, J. C., Stone, Y. O., Tsou, C., and Fernie, B. F. (1986). Identification of epitopes on respiratory syncytial virus proteins by competitive binding immunoassay. J Clin Microbiol 23, 475-480.
[0273] Bailey, J. R., Flyak, A. I., Cohen, V. J., Li, H., Wasilewski, L. N., Snider, A. E., Wang, S., Learn, G. H., Kose, N., Loerinc, L., et al. (2017). Broadly neutralizing antibodies with few somatic mutations and hepatitis C virus clearance. JCI Insight 2.
[0274] Battles, M. B., Langedijk, J. P., Furmanova-Hollenstein, P., Chaiwatpongsakorn, S., Costello, H. M., Kwanten, L., Vranckx, L., Vink, P., Jaensch, S., Jonckers, T. H., et al. (2016). Molecular mechanism of respiratory syncytial virus fusion inhibitors. Nat Chem Biol 12, 87-93.
[0275] Battye, T. G., Kontogiannis, L., Johnson, O., Powell, H. R., and Leslie, A. G. (2011). iMOSFLM: a new graphical interface for diffraction-image processing with MOSFLM. Acta Crystallogr D Biol Crystallogr 67, 271-281.
[0276] Beeler, J. A., and van Wyke Coelingh, K. (1989). Neutralization epitopes of the F glycoprotein of respiratory syncytial virus: effect of mutation upon fusion function. J Virol 63, 2941-2950.
[0277] Bornholdt, Z. A., Turner, H. L., Murin, C. D., Li, W., Sok, D., Souders, C. A., Piper, A. E., Goff, A., Shamblin, J. D., Wollen, S. E., et al. (2016). Isolation of potent neutralizing antibodies from a survivor of the 2014 Ebola virus outbreak. Science 351, 1078-1083.
[0278] Chin, J., Magoffin, R. L., Shearer, L. A., Schieble, J. H., and Lennette, E. H. (1969). Field evaluation of a respiratory syncytial virus vaccine and a trivalent parainfluenza virus vaccine in a pediatric population. Am J Epidemiol 89, 449-463.
[0279] Collaborative Computational Project, N. (1994). The CCP4 suite: programs for protein crystallography. Acta Crystallogr D Biol Crystallogr 50, 760-763.
[0280] Corti, D., Bianchi, S., Vanzetta, F., Minola, A., Perez, L., Agatic, G., Guarino, B., Silacci, C., Marcandalli, J., Marsland, B. J., et al. (2013). Cross-neutralization of four paramyxoviruses by a human monoclonal antibody. Nature 501, 439-443.
[0281] Crooks, G. E., Hon, G., Chandonia, J. M., and Brenner, S. E. (2004). WebLogo: a sequence logo generator. Genome Res 14, 1188-1190.
[0282] DeKosky, B. J., Ippolito, G. C., Deschner, R. P., Lavinder, J. J., Wine, Y., Rawlings, B. M., Varadarajan, N., Giesecke, C., Dorner, T., Andrews, S. F., et al. (2013). High-throughput sequencing of the paired human immunoglobulin heavy and light chain repertoire. Nat Biotechnol 31, 166-169.
[0283] Doria-Rose, N. A., Klein, R. M., Daniels, M. G., O'Dell, S., Nason, M., Lapedes, A., Bhattacharya, T., Migueles, S. A., Wyatt, R. T., Korber, B. T., et al. (2010). Breadth of human immunodeficiency virus-specific neutralizing activity in sera: clustering analysis and association with clinical variables. J Virol 84, 1631-1636.
[0284] Ekiert, D. C., Bhabha, G., Elsliger, M. A., Friesen, R. H., Jongeneelen, M., Throsby, M., Goudsmit, J., and Wilson, I. A. (2009). Antibody recognition of a highly conserved influenza virus epitope. Science 324, 246-251.
[0285] Emsley, P., and Cowtan, K. (2004). Coot: model-building tools for molecular graphics. Acta Crystallogr D Biol Crystallogr 60, 2126-2132.
[0286] Esposito, S., Scarselli, E., Lelii, M., Scala, A., Vitelli, A., Capone, S., Fornili, M., Biganzoli, E., Orenti, A., Nicosia, A., et al. (2016). Antibody response to respiratory syncytial virus infection in children <18 months old. Hum Vaccin Immunother 12, 1700-1706.
[0287] Evans, P. R., and Murshudov, G. N. (2013). How good are my data and what is the resolution? Acta Crystallogr D Biol Crystallogr 69, 1204-1214.
[0288] Fuentes, S., Coyle, E. M., Beeler, J., Golding, H., and Khurana, S. (2016). Antigenic Fingerprinting following Primary RSV Infection in Young Children Identifies Novel Antigenic Sites and Reveals Unlinked Evolution of Human Antibody Repertoires to Fusion and Attachment Glycoproteins. PLoS Pathog 12, e1005554.
[0289] Fulginiti, V. A., Eller, J. J., Sieber, O. F., Joyner, J. W., Minamitani, M., and Meiklejohn, G. (1969). Respiratory virus immunization. I. A field trial of two inactivated respiratory virus vaccines; an aqueous trivalent parainfluenza virus vaccine and an alum-precipitated respiratory syncytial virus vaccine. Am J Epidemiol 89, 435-448.
[0290] Gans, H., Yasukawa, L., Rinki, M., DeHovitz, R., Forghani, B., Beeler, J., Audet, S., Maldonado, Y., and Arvin, A. M. (2001). Immune responses to measles and mumps vaccination of infants at 6, 9, and 12 months. J Infect Dis 184, 817-826.
[0291] Garcia-Barreno, B., Palomo, C., Penas, C., Delgado, T., Perez-Brena, P., and Melero, J. A. (1989). Marked differences in the antigenic structure of human respiratory syncytial virus F and G glycoproteins. J Virol 63, 925-932.
[0292] Gietz, R. D., and Schiestl, R. H. (2007). High-efficiency yeast transformation using the LiAc/SS carrier DNA/PEG method. Nat Protoc 2, 31-34.
[0293] Gilman, M. S., Castellanos, C. A., Chen, M., Ngwuta, J. O., Goodwin, E., Moin, S. M., Mas, V., Melero, J. A., Wright, P. F., Graham, B. S., et al. (2016). Rapid profiling of RSV antibody repertoires from the memory B cells of naturally infected adult donors. Sci Immunol 1.
[0294] Gilman, M. S., Moin, S. M., Mas, V., Chen, M., Patel, N. K., Kramer, K., Zhu, Q., Kabeche, S. C., Kumar, A., Palomo, C., et al. (2015). Characterization of a Prefusion-Specific Antibody That Recognizes a Quaternary, Cleavage-Dependent Epitope on the RSV Fusion Glycoprotein. PLoS Pathog 11, e1005035.
[0295] Glezen, W. P., Taber, L. H., Frank, A. L., and Kasel, J. A. (1986). Risk of primary infection and reinfection with respiratory syncytial virus. Am J Dis Child 140, 543-546.
[0296] Graham, B. S. (2017). Vaccine development for respiratory syncytial virus. Curr Opin Virol 23, 107-112.
[0297] Gray, E. S., Madiga, M. C., Hermanus, T., Moore, P. L., Wibmer, C. K., Tumba, N. L., Werner, L., Mlisana, K., Sibeko, S., Williamson, C., et al. (2011). The neutralization breadth of HIV-1 develops incrementally over four years and is associated with CD4+ T cell decline and high viral load during acute infection. J Virol 85, 4828-4840.
[0298] Griffin, M. P., Khan, A. A., Esser, M. T., Jensen, K., Takas, T., Kankam, M. K., Villafana, T., and Dubovsky, F. (2017). Safety, Tolerability, and Pharmacokinetics of MEDI8897, the Respiratory Syncytial Virus Prefusion F-Targeting Monoclonal Antibody with an Extended Half-Life, in Healthy Adults. Antimicrob Agents Chemother 61.
[0299] Group, T. I.-R. S. (1998). Palivizumab, a humanized respiratory syncytial virus monoclonal antibody, reduces hospitalization from respiratory syncytial virus infection in high-risk infants. Pediatrics 102, 531-537.
[0300] Hall, C. B., Walsh, E. E., Long, C. E., and Schnabel, K. C. (1991). Immunity to and frequency of reinfection with respiratory syncytial virus. J Infect Dis 163, 693-698.
[0301] Henderson, F. W., Collier, A. M., Clyde, W. A., Jr., and Denny, F. W. (1979). Respiratory-syncytial-virus infections, reinfections and immunity. A prospective, longitudinal study in young children. N Engl J Med 300, 530-534.
[0302] Homaira, N., Rawlinson, W., Snelling, T. L., and Jaffe, A. (2014). Effectiveness of Palivizumab in Preventing RSV Hospitalization in High Risk Children: A Real-World Perspective. Int J Pediatr 2014, 571609.
[0303] Huang, K., Incognito, L., Cheng, X., Ulbrandt, N.D., and Wu, H. (2010). Respiratory syncytial virus-neutralizing monoclonal antibodies motavizumab and palivizumab inhibit fusion. J Virol 84, 8132-8140.
[0304] IJspeert, H., van Schouwenburg, P. A., van Zessen, D., Pico-Knijnenburg, I., Driessen, G. J., Stubbs, A. P., and van der Burg, M. (2016). Evaluation of the Antigen-Experienced B-Cell Receptor Repertoire in Healthy Children and Adults. Front Immunol 7, 410.
[0305] Jain, T., Sun, T., Durand, S., Hall, A., Houston, N. R., Nett, J. H., Sharkey, B., Bobrowicz, B., Caffry, I., Yu, Y., et al. (2017). Biophysical properties of the clinical-stage antibody landscape. Proc Natl Acad Sci USA 114, 944-949.
[0306] Jans, J., Pettengill, M., Kim, D., van der Made, C., de Groot, R., Henriet, S., de Jonge, M. I., Ferwerda, G., and Levy, 0. (2016). Human newborn B cells mount an interferon-alpha/beta receptor-dependent humoral response to respiratory syncytial virus. J Allergy Clin Immunol.
[0307] Jardine, J. G., Kulp, D. W., Havenar-Daughton, C., Sarkar, A., Briney, B., Sok, D., Sesterhenn, F., Ereno-Orbea, J., Kalyuzhniy, O., Deresa, I., et al. (2016). HIV-1 broadly neutralizing antibody precursor B cells revealed by germline-targeting immunogen. Science 351, 1458-1463.
[0308] Kamal-Bahl, S., Doshi, J., and Campbell, J. (2002). Economic analyses of respiratory syncytial virus immunoprophylaxis in high-risk infants: a systematic review. Arch Pediatr Adolesc Med 156, 1034-1041.
[0309] Kapikian, A. Z., Mitchell, R. H., Chanock, R. M., Shvedoff, R. A., and Stewart, C. E. (1969). An epidemiologic study of altered clinical reactivity to respiratory syncytial (RS) virus infection in children previously vaccinated with an inactivated RS virus vaccine. Am J Epidemiol 89, 405-421.
[0310] Kashyap, A. K., Steel, J., Oner, A. F., Dillon, M. A., Swale, R. E., Wall, K. M., Perry, K. J., Faynboym, A., Ilhan, M., Horowitz, M., et al. (2008). Combinatorial antibody libraries from survivors of the Turkish H5N1 avian influenza outbreak reveal virus neutralization strategies. Proc Natl Acad Sci USA 105, 5986-5991.
[0311] Kelly, R. L., Sun, T., Jain, T., Caffry, I., Yu, Y., Cao, Y., Lynaugh, H., Brown, M., Vasquez, M., Wittrup, K. D., et al. (2015). High throughput cross-interaction measures for human IgG1 antibodies correlate with clearance rates in mice. MAbs, 0.
[0312] Killikelly, A. M., Kanekiyo, M., and Graham, B. S. (2016). Pre-fusion F is absent on the surface of formalin-inactivated respiratory syncytial virus. Sci Rep 6, 34108.
[0313] Kim, H. W., Canchola, J. G., Brandt, C. D., Pyles, G., Chanock, R. M., Jensen, K., and Parrott, R. H. (1969). Respiratory syncytial virus disease in infants despite prior administration of antigenic inactivated vaccine. Am J Epidemiol 89, 422-434.
[0314] Krarup, A., Truan, D., Furmanova-Hollenstein, P., Bogaert, L., Bouchier, P., Bisschop, I. J., Widjojoatmodjo, M. N., Zahn, R., Schuitemaker, H., McLellan, J. S., et al. (2015). A highly stable prefusion RSV F vaccine derived from structural analysis of the fusion mechanism. Nat Commun 6, 8143.
[0315] Kristjansson, S., Bjarnarson, S. P., Wennergren, G., Palsdottir, A. H., Arnadottir, T., Haraldsson, A., and Jonsdottir, I. (2005). Respiratory syncytial virus and other respiratory viruses during the first 3 months of life promote a local TH2-like response. J Allergy Clin Immunol 116, 805-811.
[0316] Lambert, D. M., Barney, S., Lambert, A. L., Guthrie, K., Medinas, R., Davis, D. E., Bucy, T., Erickson, J., Merutka, G., and Petteway, S. R., Jr. (1996). Peptides from conserved regions of paramyxovirus fusion (F) proteins are potent inhibitors of viral fusion. Proc Natl Acad Sci USA 93, 2186-2191.
[0317] Lambert, L., Sagfors, A. M., Openshaw, P. J., and Culley, F. J. (2014). Immunity to RSV in Early-Life. Front Immunol 5, 466.
[0318] Legg, J. P., Hussain, I. R., Warner, J. A., Johnston, S. L., and Warner, J. O. (2003). Type 1 and type 2 cytokine imbalance in acute respiratory syncytial virus bronchiolitis. Am J Respir Crit Care Med 168, 633-639.
[0319] Lerner, R. A. (2011). Rare antibodies from combinatorial libraries suggests an S.O.S. component of the human immunological repertoire. Mol Biosyst 7, 1004-1012.
[0320] Magro, M., Mas, V., Chappell, K., Vazquez, M., Cano, O., Luque, D., Terron, M. C., Melero, J. A., and Palomo, C. (2012). Neutralizing antibodies against the preactive form of respiratory syncytial virus fusion protein offer unique possibilities for clinical intervention. Proc Natl Acad Sci USA 109, 3089-3094.
[0321] McCoy, A. J., Grosse-Kunstleve, R. W., Adams, P. D., Winn, M. D., Storoni, L. C., and Read, R. J. (2007). Phaser crystallographic software. J Appl Crystallogr 40, 658-674.
[0322] McLellan, J. S., Chen, M., Chang, J. S., Yang, Y., Kim, A., Graham, B. S., and Kwong, P. D. (2010a). Structure of a major antigenic site on the respiratory syncytial virus fusion glycoprotein in complex with neutralizing antibody 101F. J Virol 84, 12236-12244.
[0323] McLellan, J. S., Chen, M., Kim, A., Yang, Y., Graham, B. S., and Kwong, P. D. (2010b). Structural basis of respiratory syncytial virus neutralization by motavizumab. Nat Struct Mol Biol 17, 248-250.
[0324] McLellan, J. S., Chen, M., Leung, S., Graepel, K. W., Du, X., Yang, Y., Zhou, T., Baxa, U., Yasuda, E., Beaumont, T., et al. (2013). Structure of RSV fusion glycoprotein trimer bound to a prefusion-specific neutralizing antibody. Science 340, 1113-1117.
[0325] McLellan, J. S., Yang, Y., Graham, B. S., and Kwong, P. D. (2011). Structure of respiratory syncytial virus fusion glycoprotein in the postfusion conformation reveals preservation of neutralizing epitopes. J Virol 85, 7788-7796.
[0326] Morin, A., Eisenbraun, B., Key, J., Sanschagrin, P. C., Timony, M. A., Ottaviano, M., and Sliz, P. (2013). Collaboration gets the most out of software. Elife 2, e01465.
[0327] Mousa, J. J., Kose, N., Matta, P., Gilchuk, P., and Crowe, J. E., Jr. (2017). A novel pre-fusion conformation-specific neutralizing epitope on the respiratory syncytial virus fusion protein. Nat Microbiol 2, 16271.
[0328] Murphy, B. R., Alling, D. W., Snyder, M. H., Walsh, E. E., Prince, G. A., Chanock, R. M., Hemming, V. G., Rodriguez, W. J., Kim, H. W., Graham, B. S., et al. (1986). Effect of age and preexisting antibody on serum antibody response of infants and children to the F and G glycoproteins during respiratory syncytial virus infection. J Clin Microbiol 24, 894-898.
[0329] Murphy, B. R., and Walsh, E. E. (1988). Formalin-inactivated respiratory syncytial virus vaccine induces antibodies to the fusion glycoprotein that are deficient in fusion-inhibiting activity. J Clin Microbiol 26, 1595-1597.
[0330] Ngwuta, J. O., Chen, M., Modjarrad, K., Joyce, M. G., Kanekiyo, M., Kumar, A., Yassine, H. M., Moin, S. M., Killikelly, A. M., Chuang, G. Y., et al. (2015). Prefusion F-specific antibodies determine the magnitude of RSV neutralizing activity in human sera. Sci Transl Med 7, 309ra162.
[0331] Panda, S., and Ding, J. L. (2015). Natural antibodies bridge innate and adaptive immunity. J Immunol 194, 13-20.
[0332] PATH (2017). RSV Vaccine and mAb Snapshot.
[0333] Polack, F. P., Teng, M. N., Collins, P. L., Prince, G. A., Exner, M., Regele, H., Lirman, D. D., Rabold, R., Hoffman, S. J., Karp, C. L., et al. (2002). A role for immune complexes in enhanced respiratory syncytial virus disease. J Exp Med 196, 859-865.
[0334] Potterton, E., Briggs, P., Turkenburg, M., and Dodson, E. (2003). A graphical user interface to the CCP4 program suite. Acta Crystallogr D Biol Crystallogr 59, 1131-1137.
[0335] Rechavi, E., Lev, A., Lee, Y. N., Simon, A. J., Yinon, Y., Lipitz, S., Amariglio, N., Weisz, B., Notarangelo, L. D., and Somech, R. (2015). Timely and spatially regulated maturation of B and T cell repertoire during human fetal development. Sci Transl Med 7, 276ra225.
[0336] Reed, J. H., Jackson, J., Christ, D., and Goodnow, C.C. (2016). Clonal redemption of autoantibodies by somatic hypermutation away from self-reactivity during human immunization. J Exp Med 213, 1255-1265.
[0337] Reichert, J. M. (2016). Antibodies to watch in 2016. MAbs 8, 197-204.
[0338] Ridings, J., Dinan, L., Williams, R., Roberton, D., and Zola, H. (1998). Somatic mutation of immunoglobulin V(H)6 genes in human infants. Clin Exp Immunol 114, 33-39.
[0339] Rossey, I., Gilman, M. S., Kabeche, S. C., Sedeyn, K., Wrapp, D., Kanekiyo, M., Chen, M., Mas, V., Spitaels, J., Melero, J. A., et al. (2017). Potent single-domain antibodies that arrest respiratory syncytial virus fusion protein in its prefusion state. Nat Commun 8, 14158.
[0340] Sande, C. J., Cane, P. A., and Nokes, D. J. (2014). The association between age and the development of respiratory syncytial virus neutralising antibody responses following natural infection in infants. Vaccine 32, 4726-4729.
[0341] Saravia, J., You, D., Shrestha, B., Jaligama, S., Siefker, D., Lee, G. I., Harding, J. N., Jones, T. L., Rovnaghi, C., Bagga, B., et al. (2015). Respiratory Syncytial Virus Disease Is Mediated by Age-Variable IL-33. PLoS Pathog 11, e1005217.
[0342] Sastre, P., Melero, J. A., Garcia-Barreno, B., and Palomo, C. (2005). Comparison of affinity chromatography and adsorption to vaccinia virus recombinant infected cells for depletion of antibodies directed against respiratory syncytial virus glycoproteins present in a human immunoglobulin preparation. J Med Virol 76, 248-255.
[0343] Sather, D. N., Armann, J., Ching, L. K., Mavrantoni, A., Sellhorn, G., Caldwell, Z., Yu, X., Wood, B., Self, S., Kalams, S., et al. (2009). Factors associated with the development of cross-reactive neutralizing antibodies during human immunodeficiency virus type 1 infection. J Virol 83, 757-769.
[0344] Shi, T., McAllister, D. A., O'Brien, K. L., Simoes, E. A. F., Madhi, S. A., Gessner, B. D., Polack, F. P., Balsells, E., Acacio, S., Aguayo, C., et al. (2017). Global, regional, and national disease burden estimates of acute lower respiratory infections due to respiratory syncytial virus in young children in 2015: a systematic review and modelling study. Lancet.
[0345] Shinoff, J. J., O'Brien, K. L., Thumar, B., Shaw, J. B., Reid, R., Hua, W., Santosham, M., and Karron, R. A. (2008). Young infants can develop protective levels of neutralizing antibody after infection with respiratory syncytial virus. J Infect Dis 198, 1007-1015.
[0346] Siegrist, C. A., and Aspinall, R. (2009). B-cell responses to vaccination at the extremes of age. Nat Rev Immunol 9, 185-194.
[0347] Simek, M. D., Rida, W., Priddy, F. H., Pung, P., Carrow, E., Laufer, D. S., Lehrman, J. K., Boaz, M., Tarragona-Fiol, T., Miiro, G., et al. (2009). Human immunodeficiency virus type 1 elite neutralizers: individuals with broad and potent neutralizing activity identified by using a high-throughput neutralization assay together with an analytical selection algorithm. J Virol 83, 7337-7348.
[0348] Sok, D., Briney, B., Jardine, J. G., Kulp, D. W., Menis, S., Pauthner, M., Wood, A., Lee, E. C., Le, K. M., Jones, M., et al. (2016). Priming HIV-1 broadly neutralizing antibody precursors in human Ig loci transgenic mice. Science 353, 1557-1560.
[0349] Sui, J., Hwang, W. C., Perez, S., Wei, G., Aird, D., Chen, L. M., Santelli, E., Stec, B., Cadwell, G., Ali, M., et al. (2009). Structural and functional bases for broad-spectrum neutralization of avian and human influenza A viruses. Nat Struct Mol Biol 16, 265-273.
[0350] Swanson, K. A., Settembre, E. C., Shaw, C. A., Dey, A. K., Rappuoli, R., Mandl, C. W., Dormitzer, P. R., and Carfi, A. (2011). Structural basis for immunization with postfusion respiratory syncytial virus fusion F glycoprotein (RSV F) to elicit high neutralizing antibody titers. Proc Natl Acad Sci USA 108, 9619-9624.
[0351] Swers, J. S., Kellogg, B. A., and Wittrup, K. D. (2004). Shuffled antibody libraries created by in vivo homologous recombination and yeast surface display. Nucleic Acids Res 32, e36.
[0352] Thomson, C. A., Bryson, S., McLean, G. R., Creagh, A. L., Pai, E. F., and Schrader, J. W. (2008). Germline V-genes sculpt the binding site of a family of antibodies neutralizing human cytomegalovirus. EMBO J 27, 2592-2602.
[0353] Throsby, M., van den Brink, E., Jongeneelen, M., Poon, L. L., Alard, P., Cornelissen, L., Bakker, A., Cox, F., van Deventer, E., Guan, Y., et al. (2008). Heterosubtypic neutralizing monoclonal antibodies cross-protective against H5N1 and H1N1 recovered from human IgM+ memory B cells. PLoS One 3, e3942.
[0354] Tiller, T., Meffre, E., Yurasov, S., Tsuiji, M., Nussenzweig, M. C., and Wardemann, H. (2008). Efficient generation of monoclonal antibodies from single human B cells by single cell RT-PCR and expression vector cloning. J Immunol Methods 329, 112-124.
[0355] Trang, N. V., Braeckman, T., Lernout, T., Hau, V. T., Anh le, T. K., Luan le, T., Van Damme, P., and Anh, D. D. (2014). Prevalence of rotavirus antibodies in breast milk and inhibitory effects to rotavirus vaccines. Hum Vaccin Immunother 10, 3681-3687.
[0356] Troisi, C. L., Hollinger, F. B., Krause, D. S., and Pickering, L. K. (1997). Immunization of seronegative infants with hepatitis A vaccine (HAVRIX; SKB): a comparative study of two dosing schedules. Vaccine 15, 1613-1617.
[0357] Wang, J., He, Y., Jin, D., Liu, J., Zheng, J., Yuan, N., Bai, Y., Yan, T., Yang, Y., Liu, Y., et al. (2017). No response to hepatitis B vaccine in infants born to HBsAg(+) mothers is associated to the transplacental transfer of HBsAg. Infect Dis (Lond), 1-8.
[0358] Wen, X., Mousa, J. J., Bates, J. T., Lamb, R. A., Crowe, J. E., Jr., and Jardetzky, T. S. (2017). Structural basis for antibody cross-neutralization of respiratory syncytial virus and human metapneumovirus. Nat Microbiol 2, 16272.
[0359] Williams, J. V., Weitkamp, J. H., Blum, D. L., LaFleur, B. J., and Crowe, J. E., Jr. (2009). The human neonatal B cell response to respiratory syncytial virus uses a biased antibody variable gene repertoire that lacks somatic mutations. Mol Immunol 47, 407-414.
[0360] Wu, S. J., Schmidt, A., Beil, E. J., Day, N. D., Branigan, P. J., Liu, C., Gutshall, L. L., Palomo, C., Furze, J., Taylor, G., et al. (2007). Characterization of the epitope for anti-human respiratory syncytial virus F protein monoclonal antibody 101F using synthetic peptides and genetic approaches. J Gen Virol 88, 2719-2723.
[0361] Xu, Y., Roach, W., Sun, T., Jain, T., Prinz, B., Yu, T. Y., Torrey, J., Thomas, J., Bobrowicz, P., Vasquez, M., et al. (2013). Addressing polyspecificity of antibodies selected from an in vitro yeast presentation system: a FACS-based, high-throughput selection and analytical tool. Protein Eng Des Sel 26, 663-670.
[0362] Yacoob, C., Pancera, M., Vigdorovich, V., Oliver, B. G., Glenn, J. A., Feng, J., Sather, D. N., McGuire, A. T., and Stamatatos, L. (2016). Differences in Allelic Frequency and CDRH3 Region Limit the Engagement of HIV Env Immunogens by Putative VRC01 Neutralizing Antibody Precursors. Cell Rep 17, 1560-1570.
[0363] Yeung, Y. A., Foletti, D., Deng, X., Abdiche, Y., Strop, P., Glanville, J., Pitts, S., Lindquist, K., Sundar, P.D., Sirota, M., et al. (2016). Germline-encoded neutralization of a Staphylococcus aureus virulence factor by the human antibody repertoire. Nat Commun 7, 13376.
[0364] Zhang, X., Zhivaki, D., and Lo-Man, R. (2017). Unique aspects of the perinatal immune system. Nat Rev Immunol.
[0365] Zhu, Q., McLellan, J. S., Kallewaard, N. L., Ulbrandt, N. D., Palaszynski, S., Zhang, J., Moldt, B., Khan, A., Svabek, C., McAuliffe, J. M., et al. (2017). A highly potent extended half-life antibody as a potential RSV vaccine surrogate for all infants. Sci Transl Med 9

### Example 2. Isolation and Characterization of Anti-RSV F-Specific Human Infant Antibodies from Adenoid and PBMCs

[0366] Applicant has comprehensively profiled the human infant antibody response to RSV F by isolating and characterizing over 800 RSV F-specific monoclonal antibodies from paired nasopharyngeal adenoid (adenoid) and peripheral blood samples (PBMCs) of RSV-infected infants, and used these antibodies to characterize the infant antibody response as well as develop a framework for the rational design of age-specific RSV vaccines. RSV F-specific memory B cell responses were detected in the adenoids of all 6 children, and the adenoid-derived antibodies showed overall higher binding affinities and neutralization potencies compared to antibodies isolated from paired peripheral blood samples. Approximately 25% of the neutralizing antibodies isolated from adenoid tissue were derived from a unique population of IgM⁺and/or IgD⁺memory B cells that contained a high load of somatic mutations but lacked expression of classical memory B cell markers. The collective results provide insight into the mucosal B cell response to RSV and have implications for the development of vaccines that stimulate potent local responses.

Isolation of RSV F-Specific B Cells from Paired Adenoid and Peripheral Blood Samples

[0367] To analyze and compare the mucosal and systemic B cell response to natural RSV infection, paired adenoid tissue and peripheral blood samples were obtained from 6 young children between the ages of 2 and 4 years old who were undergoing tonsillectomy (Supplementary Table 1). Adenoids were used as a representative source of respiratory mucosal lymphocytes because this lymphoid tissue has been previously shown to be an important induction site for B cells that migrate to the respiratory tract and associated glands (Czerkinsky et al 1994, McGhee 2000, Brandtzaeg P1. 2011). The adenoid's location at the site of entry into the upper respiratory tract also suggests a role in anti-RSV immunity. Although none of the children had a documented history of RSV infection, previous studies have shown that essentially all children have been infected by RSV at least once by the age of 2. Consistent with the notion of prior RSV exposure, serum samples obtained from all six children displayed neutralizing activity against RSV-A2 (Supplementary Table 1).

SUPPLEMENTARY TABLE 1
Neutralizing activity against RSV-A2

| | | | 50% RSV neutralization titer | | |
|---|---|---|---|---|---|
| | | Age | | Adenoid | Adenoid |
| Subject | Gender | (yrs) | Plasma | filter | supernatant |
| 2635 | M | 3.60 | 545 | 9 | 9 |
| 2637 | F | 3.13 | 639 | <4 | 13 |
| 2665 | M | 2.82 | 506 | <4 | <4 |
| 2666 | F | 3.05 | 1702 | 13 | 177 |
| 2849 | M | 2.79 | 5133 | 4 | 55 |
| 2850 | M | 2.97 | 720 | 6 | 5 |

[0368] To assess the magnitude of the RSV F-specific B cell response in both anatomical compartments, the adenoid and PBMC samples were stained with a panel of B cell markers (CD19, CD20, IgG, IgA, CD27, and FCRL4) and fluorescently-labeled tetramers of RSV preF and postF and analyzed by flow cytometry (FIG. 13A). RSV F-reactive B cells were detected in the adenoid samples from all 6 donors but in only 4 of the 6 corresponding PBMC samples (FIG. 13B). The frequency of RSV F-specific B cells in the adenoid and PBMC samples ranged from 0.03-0.22% and 0-0.19%, respectively. There was no clear correlation between 1) the frequency of RSV F-reactive B cells in peripheral blood and adenoid tissue, and 2) the frequency of RSV F-reactive B cells in either compartment (FIG. 14A) and serum neutralization titer (FIG. 14B). The latter result is consistent with previous studies showing a lack of correlation between the frequencies of antigen-specific memory B cells and serum titers of antigen specific IgG.

[0369] Next, between 100-300 RSV F-reactive B cells from both the adenoid and PBMC samples from each of the four donors that had detectable RSV F-specific B cell responses in both compartments were single-cell sorted. Although all RSV F-reactive B cells were sorted, index sorting allowed for the determination of the B cell surface markers expressed on each sorted cell. This analysis showed that the RSV F-specific B cell subset distribution varied considerably between the two compartments and among the four donors (FIG. 13B). For example, in some donors, there was a higher proportion of RSV F-specific IgG⁺memory B cells in peripheral blood compared to adenoid tissue (e.g. donor 2635 and donor 2849), whereas the converse was observed in other donors (e.g. donor 2665). Notably, in all four donors, there was little to no enrichment for RSV F-specific IgA⁺B cells in the adenoid samples relative to the corresponding PBMC samples, and in one donor (donor 2665) there was a substantially higher proportion of RSV F-specific IgA⁺B cells in peripheral blood compared to adenoid tissue (FIG. 13B). Furthermore, in all donors, a considerable proportion (21-52%) of RSV F-specific B cells in both compartments were not class-switched and lacked the expression of the classical memory B cell marker CD27. Since previous studies have shown that the inhibitory receptor FcRL4 is expressed on a proportion of tissue-resident memory B cells (Ehrhardt et al, J Exp Med 2005), it was analyzed whether this marker was preferentially expressed on certain subsets of adenoid-derived B cells. A proportion of B cell clones within most of the subsets in both compartments expressed FcRL4, with the exception of the IgG⁻IgA⁻CD27⁻and adenoid-resident IgG⁺CD27⁻ subsets, and the large majority of FcRL4⁺B cells in both compartments were of the IgA isotype (FIG. 13C). Therefore, it was concluded that natural RSV infection induces memory B cell responses in the adenoids of young children, and the contribution of different memory B cell populations to the RSV-specific response varies among donors and between the mucosal and systemic compartments.

### An Atypical Population of RSV-Specific Memory B Cells is Enriched in Adenoid Tissue

[0370] To further characterize the RSV-specific mucosal B cell response, the antibody variable heavy (VH) and variable light (VL) chain sequences from the sorted B cells were amplified by single cell-PCR. Over 800 cognate VH-VL pairs were cloned into an IgG1 expression vector for sequencing and IgG production. Sequence analysis revealed that the RSV F-specific antibody repertoires were highly diverse in both compartments in all donors, each containing few to no expanded clonal lineages (FIG. 15A). Although deeper sequencing would be required to accurately determine the degree of overlap between the RSV F-specific clones in each compartment, one clonal lineage was identified in both the adenoid- and PBMC-derived antibody panels isolated from donor 2635 (supplementary table 2), suggesting that at least a proportion of RSV F-specific B cells recirculate between the mucosal and systemic compartments.

SUPPLEMENTARY TABLE 2
Clonal lineage from donor 2635

| VL CDR1 | VL FR2 | VL CDR2 |
|---|---|---|
| RSSQSLLHSNGFNYLD | WYLQKPGQSPQLLIY | LGSNRAS |
| RSSQSLLHSNGFNYLD | WYLQKPGQSPQLLIY | LGSNRAS |
| VL FR3 | VL CDR3 | VL FR4 |
| GVPDRFSGSGSGTDFTLKISRVEAEDVGVYYC | MQALQTLT | FGPGTKVEIK |
| GVPDRFSGSGSGTDFTLKISRVEAEDVGVYYC | MQALQTLT | FGGGTKVEIK |

[0371] Next, the CDRH3 length distribution, VH germline gene usage, and load of somatic mutations in the antibodies isolated from the two compartments were analyzed (FIG. 15B). The median CDRH3 lengths of the antibodies isolated from PBMCs and adenoids were 15 and 16 amino acids, respectively, which is consistent with previously reported median CDRH3 lengths for anti-viral antibodies (Gilman et al., Sci Immunol. 2016; Bornholdt et al., Science 2016; Collis and Martin, J M B 2003). Although the VH germline gene usage was also comparable between the two compartments, there was an enrichment for VH5-51 and VH1-69 in the adenoid-derived antibodies and an enrichment for VH4-34 and VH3-30 in the PBMC-derived antibodies across all four donor repertoires (FIG. 15C). The level of somatic mutation in the antibodies varied among the 4 donors, with the median number of VH nucleotide substitutions ranging from 8-11 in the adenoid-derived antibodies and 7-9 in the PBMC-derived antibodies (FIG. 16A and FIG. 17A-D). For 3 out of 4 donors, the load of somatic mutations trended higher in the adenoid-derived antibodies relative to the PBMC-derived antibodies, but this difference only reached statistical significance in donor 2665.

[0372] Analysis of the level of SHM within each individual B cell subset revealed that the antibodies derived from the IgG⁻IgA⁻CD27⁻adenoid B cells contained similar levels of SHM as classical IgG⁺CD27⁺and IgA⁺CD27⁺memory B cells, providing evidence that these B cells are germinal center-experienced (FIG. 16B). In contrast, the majority of antibodies derived from IgG⁻IgA⁻CD27⁻peripheral blood B cells lacked SHM, indicating a naïve B cell origin. In all 4 donors, the percentage of RSV F-specific IgG⁻IgA⁻CD27⁻B cells containing SHM was significantly higher in adenoids compared to PBMCs (FIG. 16C). Furthermore, even the small subset of somatically mutated antibodies derived from IgG⁻IgA⁻CD27⁻peripheral blood B cells contained lower levels of SHM compared to antibodies derived from IgG⁻IgA⁻CD27⁻adenoid B cells (FIG. 16D). To investigate the IgM and IgD expression profiles of the RSV F-specific IgG⁻IgA⁻CD27⁻adenoid B cells, the adenoid samples were restained with fluorescently labeled RSV F and a panel of secondary antibodies that included anti-human IgG, IgA, IgM, IgD, and CD27. This analysis revealed a high level of heterogeneity in IgM and IgD expression within this population of RSV F-specific B cells, with some of these B cells expressing only IgM or IgD and others co-expressing both markers (FIG. 16E). These B cells appear to belong to a unique population IgM and/or IgD memory B cells that contain somatic mutations but lack expression of previously described memory B cell markers.

### A Higher Proportion of Adenoid-Derived Antibodies Display High Affinity Binding and Potent Neutralizing Activity Compared to PBMC-Derived Antibodies

[0373] The apparent (IgG) binding affinities of the antibodies for RSV preF and postF were then measured using biolayer interferometry. The percentage of antibodies that bound exclusively to either preF or postF varied across the 4 donors but was similar between the two compartments within individual donors, with the exception of donor 2849, in which preF-specific antibodies were present at higher frequency in PBMCs compared to adenoid tissue (FIG. 18A). As observed in previous studies, a larger proportion of antibodies bound exclusively to preF (16-65%) than to postF (0-15%), demonstrating that the unique surfaces on preF are likely more immunogenic than those on postF. Although finer epitope mapping is required to better resolve the differences in epitope distribution between the two compartments, the results suggest that the relative immunogenicity of the different antigenic surfaces on RSV F is probably more dependent on the donor repertoire and/or immune history than on the anatomical site of B cell activation (FIG. 18A).

[0374] In 3 out of 4 donors, a higher proportion of RSV F-specific antibodies isolated from adenoids bound with medium to high affinity to preF (apparent K_{D}<5.0 nM) compared to antibodies derived from RSV F-reactive peripheral blood B cells (FIG. 18B). For example, 70% of the adenoid-derived antibodies cloned from donor 2666 displayed medium to high binding affinity to preF compared to only about 30% of the PBMC-derived antibodies. This result, combined with the observation that two additional donors had detectable RSV F-specific B cell responses in adenoid tissue but not in peripheral blood (FIG. 13B), suggests that the mucosal B cell response to RSV may be more robust than the corresponding systemic B cell response.

[0375] Next, the antibodies were tested for neutralizing activity against RSV-A2 using a previously described luciferase-based assay. 14% to 36% of the adenoid-derived antibodies and 0% to 26% of the PBMC-derived antibodies showed detectable neutralizing activity (IC₅₀<25 μg/mL) (FIG. 19A). In all donors, less than 20% of antibodies from both compartments showed highly potent neutralizing activity (IC₅₀<0.05 μg/mL), which is lower than that observed for three previously characterized healthy adult donors, in which 19-38% of isolated antibodies neutralized with high potency. The low fraction of highly potent neutralizing antibodies may be due to the young age of these donors, some of which have likely only experienced a single RSV infection. Consistent with this explanation, the antibody panel isolated from the oldest donor (donor 2635) contained the highest proportion of highly potent antibodies (FIG. 19A).

[0376] Consistent with the binding analysis, for 3 out of 4 donors, a larger proportion of adenoid-derived antibodies showed neutralizing activity compared to PBMC-derived antibodies (FIG. 19A). For example, for donor 2665, approximately 15% of adenoid-derived antibodies neutralized with an IC₅₀≤25 μg/mL whereas none of the PBMC-derived antibodies showed detectable activity at this concentration. Analysis of the relationship between preF- and postF binding activity and neutralization potency revealed that 50-60% of preF-specific antibodies isolated from both adenoids and PBMCs showed neutralizing activity compared to only 0-8% of postF-specific antibodies and 10-12% of conformation-independent antibodies (FIG. 19B). Importantly, greater than 90% of highly potent antibodies (IC₅₀<0.05 μg/mL) isolated from both compartments bound exclusively to preF. The antibody characteristics for antibodies derived from adenoid tissue and PBMCs are shown in Tables 6 and 7, respectively.

[0377] Finally, the relationship between memory B cell subset and neutralizing activity was analyzed. Approximately 90% of the PBMC-derived neutralizing antibodies originated from only three B cell subsets (IgG⁺CD27⁺, IgG⁺CD27⁻, and IgG⁻IgA⁻CD27⁺B cells). In contrast, the adenoid-derived neutralizing antibodies were more evenly distributed across the six different memory B cell populations, with the largest proportion (25%) originating from the atypical IgG⁻IgA⁻CD27⁻memory B cell subset (FIG. 19C). The antibodies isolated from this atypical memory B cell subset showed similar apparent binding affinities and neutralization potencies compared to the antibodies derived from other memory B cell subsets. These findings demonstrate that 1) adenoid tissue contains a larger proportion of high affinity neutralizing antibodies compared to peripheral blood, 2) a relatively large fraction of RSV F-specific adenoid-derived neutralizing antibodies originate from atypical memory B cells, and 3) the vast majority of neutralizing antibodies isolated from both compartments target epitopes exclusively expressed on preF.

TABLE 6
Summary of antibody characteristics for antibodies isolated from adenoid tissue

| | | | | Neutralization | | | | | VH | VL |
|---|---|---|---|---|---|---|---|---|---|---|
| | | RSV | RSV | IC50 (RSV | | PSR | VH | VL | Protein | Protein |
| Name | Donor | preF KD | postF KD | subtype A) | Specificitiy | score | Germline | Germline | Muts | Muts |
| ADI-36669 | 2635 | 1.09E−09 | N.B. | 0.02 | preF | 0.01 | VH1-46 | VK1-17 | 11 | 1 |
| ADI-36670 | 2635 | 7.49E−10 | N.B. | 0.01 | preF | 0.01 | VH1-69 | VK3-15 | 17 | 5 |
| ADI-36671 | 2635 | 7.28E−10 | N.B. | 0.01 | preF | 0.05 | VH3-11 | VL1-40 | 11 | 5 |
| ADI-36672 | 2635 | 7.03E−10 | N.B. | 0.02 | preF | 0.07 | VH3-11 | VL1-40 | 13 | 6 |
| ADI-36674 | 2635 | 7.45E−10 | N.B. | 0.01 | preF | 0.01 | VH3-21 | VL1-40 | 9 | 8 |
| ADI-36677 | 2635 | 5.40E−10 | N.B. | 0.02 | preF | 0.05 | VH3-48 | VK1-33 | 8 | 6 |
| ADI-36679 | 2635 | 8.78E−10 | N.B. | 0.01 | preF | 0.10 | VH5-51 | VK1-33 | 13 | 12 |
| ADI-36680 | 2635 | 7.19E−10 | N.B. | 0.01 | preF | 0.10 | VH5-51 | VK3-15 | 10 | 10 |
| ADI-36681 | 2635 | 1.20E−09 | N.B. | 0.01 | preF | 0.08 | VH5-51 | VK3-15 | 8 | 9 |
| ADI-41144 | 2635 | 9.40E−10 | 7.59E−10 | 0.37 | Both | 0.52 | VH1-2 | VK1-16 | 14 | 7 |
| ADI-41145 | 2635 | 3.18505E−09 | 8.14745E−10 | >25 | Both | 0.24 | VH4-59 | VK1-39 | 4 | 3 |
| ADI-41146 | 2635 | 4.44E−09 | 7.46E−10 | >25 | Both | 0.23 | VH5-51 | VK1-12 | 14 | 7 |
| ADI-41147 | 2635 | 4.6744E−10 | N.B. | 0.06 | preF | 0.21 | VH3-11 | VL1-40 | 10 | 7 |
| ADI-41149 | 2635 | 4.34E−09 | 8.57E−10 | >25 | Both | 0.16 | VH3-33 | VK3-15 | 6 | 6 |
| ADI-41153 | 2635 | 9.27936E−10 | 4.45077E−10 | >25 | Both | 0.14 | VH3-21 | VK1-39 | 17 | 12 |
| ADI-41154 | 2635 | 4.63E−09 | 1.35E−09 | >25 | Both | 0.14 | VH4-34 | VK1-39 | 9 | 7 |
| ADI-41155 | 2635 | 3.51668E−09 | 4.77633E−10 | >25 | Both | 0.13 | VH4-39 | VL1-47 | 10 | 5 |
| ADI-41156 | 2635 | N.B. | 1.69623E−09 | >25 | PostF | 0.133957365 | VH3-48 | VK1-39 | 4 | 9 |
| ADI-41157 | 2635 | 5.07E−10 | N.B. | 0.22 | preF | 0.13 | VH4-59 | VL1-47 | 6 | 13 |
| ADI-41158 | 2635 | 4.48646E−09 | N.B. | >25 | preF | 0.13 | VH3-48 | VK3-15 | 9 | 0 |
| ADI-41159 | 2635 | N.B. | 9.86775E−09 | >25 | PostF | 0.13 | VH5-51 | VK1-39 | 4 | 4 |
| ADI-41160 | 2635 | 2.41078E−09 | 3.36863E−10 | >25 | Both | 0.13 | VH1-69 | VL2-14 | 3 | 8 |
| ADI-41161 | 2635 | 2.53811E−09 | 3.63868E−10 | >25 | Both | 0.12 | VH3-48 | VL2-14 | 12 | 12 |
| ADI-41162 | 2635 | 4.06E−09 | 7.48E−10 | >25 | Both | 0.12 | VH1-69 | VK3-20 | 12 | 6 |
| ADI-41163 | 2635 | 4.65418E−09 | 6.03726E−10 | >25 | Both | 0.12 | VH3-33 | VK2-28 | 14 | 5 |
| ADI-41164 | 2635 | N.B. | 9.61753E−10 | >25 | PostF | 0.12 | VH3-48 | VK1-5 | 10 | 14 |
| ADI-41165 | 2635 | 2.40E−09 | N.B. | >25 | preF | 0.11 | VH5-51 | VK1-33 | 0 | 0 |
| ADI-41166 | 2635 | 3.15262E−09 | 4.40318E−10 | >25 | Both | 0.11 | VH1-2 | VL2-14 | 19 | 12 |
| ADI-41168 | 2635 | 1.33E−07 | N.B. | >25 | preF | 0.11 | VH3-30 | VL2-14 | 1 | 10 |
| ADI-41169 | 2635 | 4.94324E−09 | 1.18611E−09 | >25 | Both | 0.11 | VH5-51 | VK4-1 | 13 | 6 |
| ADI-41170 | 2635 | 5.67E−09 | 2.64E−09 | >25 | Both | 0.11 | VH3-23 | VK1-5 | 12 | 6 |
| ADI-41171 | 2635 | 9.80E−09 | 4.26E−09 | >25 | Both | 0.11 | VH4-31 | VK3-20 | 17 | 9 |
| ADI-41172 | 2635 | 3.05696E−09 | 7.48831E−10 | >25 | Both | 0.11 | VH3-64D | VK4-1 | 10 | 3 |
| ADI-41173 | 2635 | 3.15494E−10 | 2.93512E−10 | 0.08 | Both | 0.11 | VH1-69 | VK1-17 | 9 | 3 |
| ADI-41174 | 2635 | N.B. | 7.51319E−10 | >25 | PostF | 0.11 | VH1-18 | VL3-25 | 11 | 6 |
| ADI-41175 | 2635 | 4.25E−09 | 1.07E−09 | >25 | Both | 0.10 | VH3-33 | VK2-28 | 7 | 2 |
| ADI-41176 | 2635 | N.B. | 4.07E−09 | >25 | PostF | 0.10 | VH4-39 | VK1-27 | 13 | 6 |
| ADI-41177 | 2635 | 8.37277E−10 | N.B. | >25 | preF | 0.10 | VH1-2 | VL1-44 | 5 | 4 |
| ADI-41178 | 2635 | 1.71747E−09 | 6.01837E−10 | >25 | Both | 0.10 | VH1-2 | VK3-15 | 3 | 0 |
| ADI-41179 | 2635 | 9.48366E−10 | 3.4151E−10 | >25 | Both | 0.10 | VH1-69 | VL2-11 | 9 | 19 |
| ADI-41180 | 2635 | 4.70488E−10 | N.B. | 0.07 | preF | 0.10 | VH3-11 | VL1-40 | 8 | 9 |
| ADI-41181 | 2635 | 1.95174E−09 | 9.35655E−10 | >25 | Both | 0.10 | VH1-69 | VL2-14 | 7 | 8 |
| ADI-41182 | 2635 | 2.5543E−09 | 4.62114E−10 | >25 | Both | 0.10 | VH5-51 | VK3-15 | 6 | 6 |
| ADI-41183 | 2635 | 4.08E−09 | 1.00E−09 | >25 | Both | 0.10 | VH4-34 | VK1-39 | 15 | 13 |
| ADI-41184 | 2635 | 2.84503E−09 | 5.31986E−10 | >25 | Both | 0.10 | VH3-23 | VK1-39 | 7 | 5 |
| ADI-41185 | 2635 | 3.22683E−9 | 8.08927E−10 | >25 | Both | 0.10 | VH4-34 | VK3-20 | 5 | 6 |
| ADI-41186 | 2635 | 3.01027E−09 | 7.03469E−10 | >25 | Both | 0.10 | VH5-51 | VK3-15 | 4 | 5 |
| ADI-41188 | 2635 | 2.23985E−10 | N.B. | 0.15 | preF | 0.10 | VH4-34 | VL1-40 | 8 | 12 |
| ADI-41189 | 2635 | 2.86473E−09 | 6.07729E−10 | >25 | Both | 0.10 | VH3-21 | VL1-40 | 4 | 1 |
| ADI-41190 | 2635 | 2.29E−09 | 9.71E−10 | >25 | Both | 0.08 | VH1-3 | VK3-20 | 9 | 5 |
| ADI-41191 | 2635 | 5.01606E−10 | N.B. | 0.07 | preF | 0.08 | VH1-18 | VK2-30 | 8 | 6 |
| ADI-41192 | 2635 | 3.38603E−09 | 5.89066E−10 | >25 | Both | 0.07 | VH1-18 | VK1-39 | 12 | 3 |
| ADI-41193 | 2635 | 7.40214E−10 | N.B. | 0.07 | preF | 0.07 | VH3-11 | VL1-40 | 13 | 8 |
| ADI-41194 | 2635 | N.B. | 1.16E−09 | >25 | PostF | 0.07 | VH4-31 | VK3-20 | 10 | 7 |
| ADI-41196 | 2635 | 2.9157E−09 | 5.95141E−10 | >25 | Both | 0.07 | VH3-23 | VK1-39 | 12 | 3 |
| ADI-41197 | 2635 | 7.95E−10 | 5.31E−10 | 0.27 | Both | 0.07 | VH1-2 | VK1-39 | 12 | 5 |
| ADI-41198 | 2635 | 7.56E−10 | N.B. | 0.32 | preF | 0.06 | VH3-43 | VK1-33 | 18 | 12 |
| ADI-41199 | 2635 | 1.73E−09 | N.B. | 0.23 | preF | 0.06 | VH3-11 | VK3-15 | 7 | 24 |
| ADI-41200 | 2635 | 3.34299E−10 | 3.18362E−10 | >25 | Both | 0.05 | VH3-23 | VK2-28 | 14 | 9 |
| ADI-41201 | 2635 | 3.82297E−09 | 6.37241E−10 | >25 | Both | 0.05 | VH3-48 | VK3-11 | 15 | 9 |
| ADI-41202 | 2635 | 1.12088E−09 | 3.32852E−10 | >25 | Both | 0.05 | VH1-69 | VL2-11 | 9 | 19 |
| ADI-41203 | 2635 | 3.99236E−10 | N.B. | 0.01 | preF | 0.05 | VH5-51 | VK3-15 | 9 | 10 |
| ADI-41204 | 2635 | 5.44567E−10 | N.B. | 0.06 | preF | 0.04 | VH3-21 | VL1-40 | 3 | 3 |
| ADI-41205 | 2635 | 1.16405E−09 | 5.3591E−10 | >25 | Both | 0.04 | VH4-4 | VK4-1 | 3 | 6 |
| ADI-41206 | 2635 | 4.09075E−10 | N.B. | 0.07 | preF | 0.04 | VH3-21 | VL1-40 | 11 | 10 |
| ADI-41207 | 2635 | 2.53175E−09 | 4.37767E−10 | >25 | Both | 0.04 | VH2-70 | VL2-11 | 3 | 13 |
| ADI-41208 | 2635 | 4.83434E−10 | N.B. | 0.08 | preF | 0.04 | VH3-11 | VL1-40 | 11 | 7 |
| ADI-41209 | 2635 | 1.32E−09 | 1.59E−09 | 2.97 | Both | 0.03 | VH4-34 | VK2-28 | 11 | 3 |
| ADI-41210 | 2635 | 4.70023E−10 | N.B. | 0.10 | preF | 0.02 | VH1-18 | VK2-30 | 7 | 4 |
| ADI-41212 | 2635 | 3.17532E−09 | 4.00134E−10 | >25 | Both | 0.02 | VH1-2 | VL2-14 | 11 | 13 |
| ADI-41213 | 2635 | 3.4719E−09 | 5.76926E−10 | >25 | Both | 0.02 | VH3-53 | VL3-1 | 4 | 2 |
| ADI-41214 | 2635 | 5.6989E−09 | 1.01699E−09 | >25 | Both | 0.01 | VH3-7 | VK1-39 | 4 | 5 |
| ADI-41215 | 2635 | 4.37E−10 | 5.63E−10 | 0.32 | Both | 0.01 | VH3-20 | VL2-23 | 3 | 10 |
| ADI-41216 | 2635 | 9.03E−10 | N.B. | 0.19 | preF | 0.01 | VH3-11 | VL1-40 | 9 | 8 |
| ADI-41217 | 2635 | 4.88862E−10 | N.B. | 0.04 | preF | 0.01 | VH3-21 | VL1-40 | 7 | 5 |
| ADI-41218 | 2635 | N.B. | 7.28659E−10 | >25 | PostF | 0.01 | VH1-18 | VL1-40 | 10 | 7 |
| ADI-41219 | 2635 | N.B. | 1.28064E−09 | >25 | PostF | 0.01 | VH3-48 | VK1-39 | 7 | 4 |
| ADI-41221 | 2635 | 2.98426E−10 | 3.16654E−10 | 0.04 | Both | 0.01 | VH3-21 | VL2-11 | 8 | 18 |
| ADI-41222 | 2635 | 4.30995E−10 | N.B. | 0.02 | preF | 0.01 | VH3-30 | VL3-21 | 10 | 11 |
| ADI-41223 | 2635 | N.B. | 1.80931E−09 | >25 | PostF | 0.00 | VH3-30 | VL2-14 | 6 | 11 |
| ADI-41224 | 2635 | 5.24E−10 | 5.58E−10 | 0.13 | Both | 0.00 | VH3-49 | VL6-57 | 7 | 5 |
| ADI-41225 | 2635 | 4.15E−09 | 7.33E−10 | >25 | Both | 0.00 | VH3-11 | VK1-5 | 11 | 8 |
| ADI-41226 | 2635 | 8.20E−10 | N.B. | 0.15 | preF | 0.00 | VH3-11 | VL1-40 | 15 | 2 |
| ADI-41227 | 2635 | 4.62E−09 | N.B. | >25 | preF | 0.00 | VH1-69 | VL1-36 | 19 | 0 |
| ADI-41228 | 2635 | 4.86239E−09 | 6.1786E−10 | >25 | Both | 0.00 | VH4-59 | VL2-14 | 6 | 3 |
| ADI-41229 | 2635 | 1.14E−09 | 7.08E−10 | 0.07 | Both | 0.00 | VH3-30 | VK1-33 | 10 | 3 |
| ADI-41230 | 2635 | 1.83E−09 | 4.07E−10 | 24.10 | Both | 0.00 | VH5-51 | VL6-57 | 11 | 3 |
| ADI-41231 | 2635 | 3.05E−09 | 4.26E−10 | >25 | Both | 0.00 | VH5-51 | VL6-57 | 14 | 8 |
| ADI-41232 | 2635 | 7.05E−10 | N.B. | 0.03 | preF | 0.00 | VH1-18 | VK2-30 | 6 | 1 |
| ADI-41233 | 2635 | 1.06E−09 | N.B. | 0.15 | preF | 0.00 | VH3-11 | VL1-40 | 5 | 3 |
| ADI-41234 | 2635 | 1.46E−09 | N.B. | 0.10 | preF | 0.00 | VH3-30 | VK2-28 | 47 | 4 |
| ADI-41235 | 2635 | 4.72E−09 | 3.24E−09 | >25 | Both | 0.00 | VH4-34 | VL1-40 | 8 | 7 |
| ADI-41236 | 2635 | N.B. | 6.13E−08 | >25 | PostF | 0.00 | VH3-11 | VL1-40 | 7 | 14 |
| ADI-41237 | 2635 | 7.94E−10 | N.B. | 0.04 | preF | 0.00 | VH3-11 | VL1-40 | 5 | 3 |
| ADI-41238 | 2635 | 1.03E−09 | N.B. | 0.13 | preF | 0.00 | VH3-11 | VL1-40 | 5 | 6 |
| ADI-41239 | 2635 | 4.25E−09 | 1.47E−09 | >25 | Both | 0.00 | VH2-5 | VK2-28 | 6 | 1 |
| ADI-41240 | 2635 | 2.15E−09 | 1.20E−09 | >25 | Both | 0.00 | VH4-34 | VK1-5 | 13 | 10 |
| ADI-41241 | 2635 | 3.84E−09 | 9.27E−10 | 18.76 | Both | 0.00 | VH1-2 | VK1-39 | 4 | 6 |
| ADI-41242 | 2635 | 4.18E−09 | 9.07E−10 | >25 | Both | 0.00 | VH3-33 | VK2-28 | 12 | 2 |
| ADI-41243 | 2635 | 3.55E−09 | 4.18E−10 | >25 | Both | 0.00 | VH5-51 | VL6-57 | 9 | 4 |
| ADI-41244 | 2635 | N.B. | 8.43E−10 | >25 | PostF | 0.00 | VH3-53 | VK4-1 | 7 | 6 |
| ADI-41245 | 2635 | 7.75E−10 | N.B. | 0.71 | preF | 0.00 | VH3-11 | VL1-40 | 8 | 2 |
| ADI-41246 | 2635 | 3.07945E−09 | N.B. | >25 | preF | 0.00 | VH4-59 | VK3-20 | 4 | 6 |
| ADI-41247 | 2635 | 2.76078E−09 | 1.0202E−09 | >25 | Both | 0.00 | VH1-2 | VL6-57 | 10 | 1 |
| ADI-41248 | 2635 | 3.35413E−09 | 3.91839E−10 | >25 | Both | 0.00 | VH3-33 | VK1-39 | 7 | 5 |
| ADI-41249 | 2635 | 3.91497E−10 | N.B. | 0.01 | preF | 0.00 | VH5-51 | VK1-33 | 14 | 4 |
| ADI-41250 | 2635 | 7.30505E−10 | 5.04204E−10 | >25 | Both | 0.00 | VH4-34 | VL2-14 | 10 | 8 |
| ADI-41251 | 2635 | 5.92669E−10 | N.B. | 0.11 | preF | 0.00 | VH3-11 | VL1-40 | 5 | 2 |
| ADI-41252 | 2635 | 1.3715E−09 | 1.00354E−09 | >25 | Both | 0.00 | VH5-51 | VK1-33 | 11 | 2 |
| ADI-41253 | 2635 | 1.11084E−09 | N.B. | 0.03 | preF | 0.00 | VH4-39 | VK3-20 | 19 | 8 |
| ADI-41254 | 2635 | 7.75513E−10 | N.B. | >25 | preF | 0.00 | VH3-48 | VL1-44 | 8 | 8 |
| ADI-41255 | 2635 | 2.04133E−09 | 1.54027E−09 | >25 | Both | 0.00 | VH3-23 | VK3-15 | 6 | 3 |
| ADI-41256 | 2635 | 3.53762E−10 | N.B. | 0.02 | preF | 0.00 | VH1-69 | VK2-30 | 18 | 3 |
| ADI-41257 | 2635 | 3.81012E−09 | N.B. | >25 | preF | 0.00 | VH1-69 | VK1-39 | 10 | 6 |
| ADI-41258 | 2635 | 9.68014E−10 | N.B. | >25 | preF | 0.00 | VH3-23 | VL3-25 | 12 | 2 |
| ADI-41259 | 2635 | 3.35934E−10 | N.B. | 0.02 | preF | 0.00 | VH3-11 | VK2-30 | 9 | 8 |
| ADI-41261 | 2665 | 3.08217E−09 | 1.66794E−09 | >25 | Both | 0.33 | VH1-69 | VK3-20 | 7 | 0 |
| ADI-41263 | 2665 | 2.90427E−09 | 3.45081E−10 | >25 | Both | 0.25 | VH1-46 | VL6-57 | 13 | 5 |
| ADI-41264 | 2665 | N.B. | 4.83588E−10 | >25 | PostF | 0.15 | VH3-15 | VL3-10 | 9 | 13 |
| ADI-41265 | 2665 | 1.50426E−08 | 3.0791E−09 | >25 | Both | 0.15 | VH5-51 | VL1-51 | 15 | 6 |
| ADI-41266 | 2665 | 4.05839E−09 | N.B. | >25 | preF | 0.14 | VH6-1 | VL3-21 | 0 | 11 |
| ADI-41267 | 2665 | 1.0722E−08 | 1.09048E−08 | >25 | Both | 0.12 | VH4-4 | VL3-1 | 6 | 10 |
| ADI-41268 | 2665 | 5.80544E−10 | N.B. | 0.176867623 | preF | 0.11 | VH3-21 | VL2-14 | 12 | 7 |
| ADI-41270 | 2665 | 4.91907E−09 | 6.17282E−10 | >25 | Both | 0.11 | VH3-30-3 | VL2-23 | 5 | 5 |
| ADI-41271 | 2665 | N.B. | 3.11283E−09 | >25 | PostF | 0.11 | VH6-1 | VK4-1 | 2 | 3 |
| ADI-41273 | 2665 | 3.06182E−09 | 1.17234E−09 | >25 | Both | 0.11 | VH3-48 | VL2-11 | 17 | 12 |
| ADI-41274 | 2665 | 4.79702E−10 | N.B. | 0.109081031 | preF | 0.10 | VH3-21 | VL1-40 | 11 | 10 |
| ADI-41275 | 2665 | 5.74247E−09 | 1.32887E−09 | >25 | Both | 0.10 | VH3-21 | VK2-28 | 14 | 7 |
| ADI-41276 | 2665 | N.B. | 3.14914E−09 | >25 | PostF | 0.10 | VH3-49 | VK3-20 | 7 | 2 |
| ADI-41277 | 2665 | 3.59859E−09 | 7.80097E−10 | >25 | Both | 0.10 | VH4-4 | VK1-39 | 12 | 6 |
| ADI-41278 | 2665 | 1.28256E−09 | 4.82496E−10 | >25 | Both | 0.10 | VH2-70D | VK1-39 | 7 | 8 |
| ADI-41279 | 2665 | 5.04148E−08 | 4.78337E−08 | >25 | Both | 0.10 | VH5-51 | VL1-40 | 16 | 10 |
| ADI-41280 | 2665 | 3.62407E−09 | 4.82968E−10 | >25 | Both | 0.10 | VH4-59 | VK3-20 | 8 | 8 |
| ADI-41281 | 2665 | 6.69584E−09 | 1.57901E−09 | >25 | Both | 0.10 | VH1-3 | VK1-39 | 18 | 12 |
| ADI-41282 | 2665 | 3.24641E−09 | 1.25067E−09 | >25 | Both | 0.10 | VH3-30-3 | VK3-20 | 11 | 9 |
| ADI-41283 | 2665 | 2.74028E−08 | 7.95247E−09 | >25 | Both | 0.10 | VH2-5 | VK1-39 | 4 | 14 |
| ADI-41284 | 2665 | 3.05821E−09 | 5.47248E−10 | >25 | Both | 0.10 | VH3-15 | VL1-51 | 9 | 3 |
| ADI-41285 | 2665 | 5.11231E−10 | 4.12147E−10 | >25 | Both | 0.10 | VH1-69 | VL1-47 | 12 | 3 |
| ADI-41286 | 2665 | 7.59591E−09 | 5.48535E−09 | >25 | Both | 0.10 | VH1-18 | VK1-12 | 4 | 6 |
| ADI-41287 | 2665 | 3.22264E−09 | 5.97933E−10 | 5.845176257 | Both | 0.09 | VH3-9 | VL2-11 | 10 | 4 |
| ADI-41288 | 2665 | 8.99143E−09 | N.B. | >25 | preF | 0.08 | VH3-23 | VK3-20 | 14 | 12 |
| ADI-41289 | 2665 | N.B. | 8.81474E−10 | >25 | PostF | 0.08 | VH5-51 | VL2-23 | 8 | 10 |
| ADI-41291 | 2665 | 2.9847E−09 | 1.20178E−09 | >25 | Both | 0.07 | VH4-34 | VK1-39 | 16 | 9 |
| ADI-41292 | 2665 | 8.83038E−07 | 1.94972E−07 | >25 | Both | 0.06 | VH3-30 | VK1-5 | 10 | 12 |
| ADI-41293 | 2665 | 4.95631E−10 | 4.10968E−10 | 0.159400369 | Both | 0.05 | VH4-30-4 | VK3-20 | 6 | 6 |
| ADI-41294 | 2665 | 5.11755E−10 | N.B. | 0.080516504 | preF | 0.05 | VH3-48 | VL2-8 | 10 | 9 |
| ADI-41296 | 2665 | 3.35264E−09 | N.B. | >25 | preF | 0.04 | VH5-51 | VL3-25 | 20 | 19 |
| ADI-41297 | 2665 | 3.90841E−09 | 6.27923E−10 | >25 | Both | 0.04 | VH1-69 | VL2-14 | 5 | 6 |
| ADI-41299 | 2665 | 3.48237E−09 | 2.24822E−09 | >25 | Both | 0.04 | VH3-30 | VL2-23 | 14 | 12 |
| ADI-41302 | 2665 | 6.54219E−10 | N.B. | 0.006 | preF | 0.03 | VH3-30 | VL2-8 | 10 | 7 |
| ADI-41303 | 2665 | 2.95589E−09 | 9.43837E−10 | >25 | Both | 0.03 | VH3-23 | VK3-20 | 18 | 14 |
| ADI-41304 | 2665 | 3.37926E−10 | 3.30067E−10 | >25 | Both | 0.03 | VH4-30-4 | VL1-44 | 9 | 9 |
| ADI-41305 | 2665 | 3.63645E−09 | 4.31019E−10 | >25 | Both | 0.03 | VH4-31 | VK3-20 | 7 | 4 |
| ADI-41306 | 2665 | 4.61555E−10 | 4.54221E−10 | 0.173227379 | Both | 0.02 | VH4-30-4 | VK3-11 | 21 | 10 |
| ADI-41307 | 2665 | 2.98694E−09 | 8.29508E−10 | >25 | Both | 0.02 | VH3-21 | VK3-15 | 15 | 14 |
| ADI-41308 | 2665 | 4.00249E−09 | 5.18915E−10 | >25 | Both | 0.02 | VH6-1 | VL2-14 | 4 | 15 |
| ADI-41309 | 2665 | 4.33574E−09 | 1.36177E−09 | >25 | Both | 0.02 | VH4-30-4 | VK3-20 | 8 | 4 |
| ADI-41310 | 2665 | 3.3197E−09 | N.B. | >25 | preF | 0.02 | VH5-51 | VL3-25 | 18 | 22 |
| ADI-41311 | 2665 | 7.53938E−10 | 5.24E−10 | >25 | Both | 0.01 | VH2-70 | VK1-39 | 7 | 8 |
| ADI-41312 | 2665 | 3.37922E−09 | 8.56857E−10 | >25 | Both | 0.01 | VH4-4 | VL1-44 | 8 | 2 |
| ADI-41313 | 2665 | 4.54784E−10 | 3.41756E−10 | >25 | Both | 0.01 | VH1-18 | VL3-9 | 11 | 13 |
| ADI-41314 | 2665 | 2.40926E−09 | 4.14355E−10 | >25 | Both | 0.01 | VH1-69 | VL3-25 | 13 | 18 |
| ADI-41315 | 2665 | 2.93399E−09 | 1.0343E−09 | >25 | Both | 0.01 | VH4-59 | VK3-20 | 8 | 5 |
| ADI-41316 | 2665 | 3.73659E−09 | 1.04515E−09 | >25 | Both | 0.01 | VH3-30 | VK3-15 | 9 | 5 |
| ADI-41317 | 2665 | 4.81624E−08 | N.B. | 4.657687235 | preF | 0.01 | VH3-7 | VL1-40 | 12 | 11 |
| ADI-41318 | 2665 | 4.26427E−07 | 3.53944E−08 | >25 | Both | 0.01 | VH1-69 | VK1-13 | 16 | 9 |
| ADI-41319 | 2665 | 4.4099E−09 | 5.86603E−10 | >25 | Both | 0.01 | VH4-30-4 | VK3-20 | 4 | 4 |
| ADI-41320 | 2665 | 3.20131E−09 | N.B. | >25 | preF | 0.01 | VH5-51 | VL3-25 | 24 | 18 |
| ADI-41322 | 2665 | 2.98155E−09 | N.B. | >25 | preF | 0.00 | VH1-69 | VK1-12 | 9 | 3 |
| ADI-41323 | 2665 | 1.94986E−09 | 3.30643E−10 | >25 | Both | 0.00 | VH3-20 | VL6-57 | 10 | 5 |
| ADI-41324 | 2665 | 2.4749E−09 | 4.26392E−10 | >25 | Both | 0.00 | VH3-66 | VK3-20 | 4 | 6 |
| ADI-41340 | 2665 | 3.50828E−09 | N.B. | >25 | preF | 0.00 | VH1-69 | VL2-14 | 18 | 11 |
| ADI-41341 | 2665 | 2.83245E−09 | 1.96942E−09 | >25 | Both | 0.00 | VH1-69 | VL1-51 | 6 | 9 |
| ADI-41342 | 2665 | 3.99333E−09 | 5.90775E−10 | >25 | Both | 0.00 | VH1-69 | VK3-20 | 9 | 7 |
| ADI-41343 | 2665 | 7.21165E−10 | N.B. | 0.177309561 | preF | 0.00 | VH3-21 | VL1-40 | 5 | 3 |
| ADI-41344 | 2665 | 4.94249E−10 | N.B. | 0.063680457 | preF | 0.00 | VH3-21 | VL1-40 | 7 | 4 |
| ADI-41345 | 2665 | 2.28687E−09 | 3.48826E−10 | >25 | Both | 0.00 | VH5-51 | VL6-57 | 7 | 2 |
| ADI-41346 | 2665 | 1.88377E−09 | 2.67433E−10 | >25 | Both | 0.00 | VH5-51 | VL6-57 | 15 | 9 |
| ADI-41347 | 2665 | 2.60039E−09 | 5.2114E−10 | >25 | Both | 0.00 | VH4-4 | VK2-28 | 11 | 5 |
| ADI-41348 | 2665 | 4.75842E−10 | 4.3847E−10 | 0.076469111 | Both | 0.00 | VH4-31 | VK1-39 | 3 | 9 |
| ADI-41349 | 2665 | 6.24824E−09 | | >25 | Both | 0.00 | VH3-49 | VK1-33 | 12 | 8 |
| ADI-41350 | 2665 | N.B. | 6.01842E−10 | >25 | PostF | 0.00 | VH3-23 | VL2-14 | 4 | 9 |
| ADI-41351 | 2665 | 8.86433E−10 | N.B. | 0.148889821 | preF | 0.00 | VH3-64 | VK3-15 | 15 | 3 |
| ADI-41352 | 2665 | 3.35674E−09 | N.B. | >25 | preF | 0.00 | VH3-48 | VK4-1 | 4 | 0 |
| ADI-41353 | 2665 | 3.90918E−09 | N.B. | >25 | preF | 0.00 | VH5-51 | VL3-25 | 19 | 17 |
| ADI-41354 | 2665 | 7.71337E−10 | 4.28593E−10 | >25 | Both | 0.00 | VH3-23 | VK1-33 | 2 | 19 |
| ADI-41355 | 2665 | 3.84279E−09 | 1.17814E−09 | >25 | Both | 0.00 | VH3-11 | VL3-21 | 10 | 11 |
| ADI-41356 | 2665 | 7.24816E−10 | N.B. | 0.115429214 | preF | 0.00 | VH1-8 | VL3-1 | 4 | 7 |
| ADI-41357 | 2665 | 3.30683E−09 | N.B. | >25 | preF | 0.00 | VH3-48 | VK1-16 | 7 | 4 |
| ADI-41358 | 2665 | 8.64199E−10 | N.B. | 0.388841883 | preF | 0.00 | VH3-21 | VL1-40 | 5 | 4 |
| ADI-41359 | 2665 | 5.27247E−10 | N.B. | >25 | preF | 0.00 | VH3-21 | VL1-40 | 4 | 4 |
| ADI-41360 | 2665 | 2.45821E−09 | 3.58127E−10 | >25 | Both | 0.00 | VH3-48 | VL6-57 | 11 | 1 |
| ADI-41361 | 2665 | N.B. | 3.8252E−10 | 2.539820038 | PostF | 0.00 | VH3-30 | VK3-15 | 8 | 3 |
| ADI-41362 | 2665 | 3.37246E−09 | N.B. | 0.910656137 | preF | 0.00 | VH3-7 | VK1-33 | 14 | 11 |
| ADI-41363 | 2665 | 1.84993E−09 | N.B. | 0.143419355 | preF | 0.00 | VH1-69 | VK1-33 | 5 | 6 |
| ADI-41364 | 2665 | 1.31503E−09 | N.B. | 0.140467535 | preF | 0.00 | VH1-2 | VL2-23 | 17 | 6 |
| ADI-41365 | 2665 | 2.87064E−09 | 2.22411E−09 | >25 | Both | 0.00 | VH3-11 | VL1-40 | 7 | 8 |
| ADI-41366 | 2665 | 1.79472E−09 | 2.78051E−10 | >25 | Both | 0.00 | VH5-51 | VL6-57 | 10 | 8 |
| ADI-41367 | 2665 | 1.75638E−08 | 4.7231E−09 | >25 | Both | 0.00 | VH1-3 | VL2-14 | 19 | 13 |
| ADI-41368 | 2665 | 3.07672E−09 | 8.77542E−10 | >25 | Both | 0.00 | VH3-30 | VK1-5 | 14 | 9 |
| ADI-41369 | 2665 | 6.84843E−10 | 3.07855E−10 | >25 | Both | 0.00 | VH3-30 | VL6-57 | 6 | 4 |
| ADI-41370 | 2665 | 5.58964E−09 | 1.63921E−09 | >25 | Both | 0.00 | VH3-21 | VL3-25 | 6 | 6 |
| ADI-41371 | 2665 | 2.96473E−09 | 5.42686E−10 | >25 | Both | 0.00 | VH4-30-4 | VK3-20 | 14 | 11 |
| ADI-41372 | 2665 | 2.47619E−09 | 4.2465E−10 | >25 | Both | 0.00 | VH1-69 | VL3-25 | 8 | 19 |
| ADI-41373 | 2665 | 3.71092E−09 | 1.18174E−09 | >25 | Both | 0.00 | VH3-11 | VL1-40 | 15 | 7 |
| ADI-41374 | 2665 | 1.38715E−09 | 3.69047E−10 | >25 | Both | 0.00 | VH1-69 | VK1-33 | 17 | 9 |
| ADI-41375 | 2665 | 2.96439E−09 | 1.01798E−09 | >25 | Both | 0.00 | VH3-30 | VK1-13 | 8 | 8 |
| ADI-41376 | 2665 | 4.15159E−09 | 7.0539E−10 | >25 | Both | 0.00 | VH3-30 | VK3-15 | 8 | 4 |
| ADI-41377 | 2665 | 1.73768E−09 | N.B. | 0.239614261 | preF | 0.00 | VH6-1 | VL3-21 | 11 | 15 |
| ADI-41378 | 2665 | 2.98284E−09 | 7.38719E−10 | >25 | Both | 0.00 | VH4-4 | VK1-39 | 5 | 10 |
| ADI-41379 | 2665 | N.B. | 1.10788E−09 | >25 | PostF | 0.00 | VH5-51 | VK1-33 | 5 | 6 |
| ADI-41380 | 2665 | 2.56169E−10 | N.B. | 0.054916106 | preF | 0.00 | VH5-51 | VK1-33 | 0 | 4 |
| ADI-41381 | 2665 | 2.60472E−09 | 1.33733E−09 | >25 | Both | 0.00 | VH4-30-4 | VK3-20 | 13 | 5 |
| ADI-41382 | 2666 | 4.91343E−10 | N.B. | 0.02 | preF | 0.00 | VH3-9 | VK3-15 | 10 | 2 |
| ADI-41384 | 2666 | 3.45299E−09 | 5.63124E−10 | >25 | Both | 0.20 | VH1-69 | VK3-20 | 10 | 7 |
| ADI-41385 | 2666 | 4.52281E−09 | 6.00686E−10 | >25 | Both | 0.10 | VH3-33 | VL1-40 | 3 | 2 |
| ADI-41386 | 2666 | 4.03244E−10 | N.B. | >25 | preF | 0.10 | VH1-2 | VL1-44 | 11 | 7 |
| ADI-41389 | 2666 | 2.58276E−09 | 5.12803E−10 | >25 | Both | 0.10 | VH3-30-3 | VL3-25 | 7 | 1 |
| ADI-41390 | 2666 | 6.40545E−10 | N.B. | 0.62 | preF | 0.10 | VH3-21 | VL1-40 | 7 | 4 |
| ADI-41391 | 2666 | 8.82233E−10 | 4.78533E−10 | >25 | Both | 0.10 | VH4-59 | VL2-14 | 3 | 5 |
| ADI-41392 | 2666 | 3.29102E−10 | 3.58725E−10 | 0.18 | Both | 0.10 | VH3-30-3 | VL2-14 | 14 | 8 |
| ADI-41393 | 2666 | 1.66525E−09 | 2.46585E−10 | >25 | Both | 0.10 | VH5-51 | VL6-57 | 2 | 3 |
| ADI-41394 | 2666 | 3.06807E−09 | N.B. | >25 | preF | 0.10 | VH1-69 | VL4-60 | 11 | 9 |
| ADI-41396 | 2666 | 5.1704E−10 | N.B. | 1.37 | preF | 0.10 | VH3-21 | VL1-40 | 9 | 3 |
| ADI-41397 | 2666 | 5.81313E−10 | N.B. | 0.09 | preF | 0.10 | VH3-21 | VL1-40 | 10 | 2 |
| ADI-41398 | 2666 | 6.00144E−10 | N.B. | 0.17 | preF | 0.09 | VH1-18 | VK2-30 | 1 | 4 |
| ADI-41399 | 2666 | 3.14259E−09 | N.B. | >25 | preF | 0.09 | VH1-3 | VL2-14 | 3 | 5 |
| ADI-41400 | 2666 | N.B. | 5.47444E−10 | >25 | PostF | 0.09 | VH3-48 | VK1-5 | 8 | 4 |
| ADI-41401 | 2666 | 3.21615E−09 | N.B. | >25 | preF | 0.07 | VH3-9 | VK1-39 | 5 | 5 |
| ADI-41403 | 2666 | 3.04427E−09 | 8.41083E−10 | >25 | Both | 0.04 | VH3-21 | VK2-28 | 9 | 3 |
| ADI-41404 | 2666 | 4.73759E−08 | 1.3574E−08 | >25 | Both | 0.04 | VH1-69 | VK3-20 | 8 | 3 |
| ADI-41405 | 2666 | 2.72169E−09 | 4.58099E−10 | >25 | Both | 0.02 | VH3-48 | VK3-11 | 9 | 2 |
| ADI-41406 | 2666 | N.B. | 5.71343E−10 | >25 | PostF | 0.02 | VH3-23 | VK1-16 | 8 | 6 |
| ADI-41407 | 2666 | 2.08406E−09 | 3.71284E−10 | >25 | Both | 0.01 | VH3-23 | VK1-27 | 9 | 7 |
| ADI-41408 | 2666 | 2.13579E−09 | N.B. | >25 | preF | 0.00 | VH5-51 | VK1-33 | 9 | 7 |
| ADI-41409 | 2666 | 6.26652E−10 | N.B. | 0.29 | preF | 0.00 | VH1-18 | VK2-30 | 4 | 2 |
| ADI-41414 | 2666 | 2.70176E−09 | 1.1037E−09 | >25 | Both | 0.00 | VH3-66 | VK1-5 | 14 | 4 |
| ADI-41415 | 2666 | 1.08103E−09 | 6.43742E−10 | >25 | Both | 0.11 | VH2-70D | VK1-39 | 9 | 10 |
| ADI-41416 | 2666 | 4.43792E−10 | N.B. | 0.05 | preF | 0.10 | VH3-21 | VL1-40 | 8 | 5 |
| ADI-41417 | 2666 | 9.19338E−10 | N.B. | 0.71 | preF | 0.10 | VH3-21 | VL1-40 | 3 | 2 |
| ADI-41418 | 2666 | 1.58304E−09 | 3.41314E−10 | >25 | Both | 0.10 | VH3-15 | VL3-10 | 13 | 5 |
| ADI-41419 | 2666 | 3.0463E−10 | N.B. | 0.01 | preF | 0.10 | VH3-9 | VL2-14 | 4 | 6 |
| ADI-41420 | 2666 | N.B. | 1.09885E−07 | >25 | PostF | 0.10 | VH3-30-3 | VL2-18 | 0 | 0 |
| ADI-41421 | 2666 | 2.51681E−09 | N.B. | 4.78 | preF | 0.10 | VH1-18 | VL3-10 | 18 | 4 |
| ADI-41423 | 2666 | 5.86859E−08 | N.B. | >25 | preF | 0.10 | VH3-21 | VL2-14 | 0 | 1 |
| ADI-41424 | 2666 | 7.44001E−10 | N.B. | 0.28 | preF | 0.00 | VH1-18 | VK2-30 | 14 | 13 |
| ADI-41425 | 2666 | 1.13708E−09 | 4.96097E−10 | >25 | Both | 0.00 | VH2-70 | VK1-39 | 13 | 9 |
| ADI-41427 | 2666 | 2.69701E−09 | 9.17353E−10 | >25 | Both | 0.21 | VH4-59 | VL2-14 | 5 | 1 |
| ADI-41429 | 2666 | 3.61957E−09 | 1.00206E−09 | >25 | Both | 0.10 | VH1-69 | VL2-14 | 3 | 2 |
| ADI-41431 | 2666 | 7.44349E−10 | 3.44594E−10 | 2.38 | Both | 0.10 | VH1-18 | VL1-51 | 14 | 7 |
| ADI-41432 | 2666 | 2.04914E−09 | 2.86037E−10 | >25 | Both | 0.10 | VH1-69 | VL2-11 | 14 | 8 |
| ADI-41433 | 2666 | N.B. | 1.2267E−09 | >25 | PostF | 0.10 | VH3-30 | VL2-11 | 8 | 4 |
| ADI-41434 | 2666 | 6.13319E−10 | N.B. | >25 | preF | 0.10 | VH3-9 | VK3-15 | 5 | 3 |
| ADI-41435 | 2666 | N.B. | 3.47214E−09 | >25 | PostF | 0.10 | VH3-21 | VL1-44 | 6 | 4 |
| ADI-41436 | 2666 | 1.10343E−09 | 2.3675E−10 | >25 | Both | 0.10 | VH3-30-3 | VL6-57 | 11 | 5 |
| ADI-41437 | 2666 | 3.5009E−10 | N.B. | >25 | preF | 0.04 | VH1-18 | VK4-1 | 13 | 4 |
| ADI-41438 | 2666 | 3.1446E−09 | N.B. | >25 | preF | 0.00 | VH1-69 | VK3-15 | 22 | 11 |
| ADI-41439 | 2666 | 5.00975E−10 | N.B. | 0.34 | preF | 0.00 | VH1-18 | VK2-30 | 10 | 2 |
| ADI-41440 | 2666 | 3.18018E−09 | 1.23422E−09 | >25 | Both | 0.00 | VH3-21 | VK3-15 | 8 | 4 |
| ADI-41441 | 2666 | 3.11642E−09 | N.B. | >25 | preF | 0.00 | VH4-39 | VK1-9 | 12 | 5 |
| ADI-41442 | 2666 | 5.21389E−10 | N.B. | 0.04 | preF | 0.00 | VH3-9 | VK3D-15 | 3 | 3 |
| ADI-41443 | 2666 | 2.39989E−09 | 3.73358E−10 | >25 | Both | 0.00 | VH3-33 | VK2-28 | 7 | 7 |
| ADI-41444 | 2666 | 3.01394E−09 | 5.40812E−10 | >25 | Both | 0.00 | VH4-30-4 | VK1-5 | 17 | 10 |
| ADI-41445 | 2666 | 3.04263E−09 | 7.71859E−10 | >25 | Both | 0.19 | VH1-69 | VK3-20 | 17 | 6 |
| ADI-41446 | 2666 | 3.60473E−09 | 7.21955E−10 | >25 | Both | 0.12 | VH3-23 | VK3-11 | 10 | 6 |
| ADI-41447 | 2666 | 5.40998E−08 | N.B. | >25 | preF | 0.12 | VH3-23 | VK3-20 | 4 | 3 |
| ADI-41448 | 2666 | 2.74846E−09 | 4.28394E−10 | >25 | Both | 0.10 | VH1-69 | VL2-14 | 16 | 12 |
| ADI-41449 | 2666 | 5.07579E−10 | N.B. | 0.16 | preF | 0.10 | VH3-21 | VL1-40 | 10 | 5 |
| ADI-41450 | 2666 | 6.13101E−10 | N.B. | 0.21 | preF | 0.10 | VH3-21 | VL1-40 | 12 | 9 |
| ADI-41451 | 2666 | 1.82249E−09 | 1.66981E−09 | 0.84 | Both | 0.10 | VH3-48 | VL3-1 | 13 | 16 |
| ADI-41452 | 2666 | 3.33249E−09 | N.B. | >25 | preF | 0.10 | VH1-3 | VL2-14 | 19 | 6 |
| ADI-41453 | 2666 | 2.16827E−09 | 4.02833E−10 | >25 | Both | 0.10 | VH1-8 | VL3-9 | 8 | 4 |
| ADI-41454 | 2666 | 5.87531E−10 | N.B. | 0.88 | preF | 0.10 | VH1-18 | VK2-30 | 7 | 4 |
| ADI-41455 | 2666 | 1.52555E−09 | 6.37546E−10 | >25 | Both | 0.08 | VH4-30-4 | VK3-11 | 8 | 1 |
| ADI-41456 | 2666 | 1.48371E−09 | 2.66707E−10 | >25 | Both | 0.08 | VH3-74 | VL6-57 | 13 | 3 |
| ADI-41488 | 2849 | N.B. | 6.05E−10 | >25 | PostF | 0.10 | VH4-59 | VL2-11 | 12 | 6 |
| ADI-41489 | 2849 | 8.80E−08 | N.B. | >25 | preF | 0.10 | VH3-30 | VK3-15 | 13 | 6 |
| ADI-41491 | 2849 | 4.39E−10 | N.B. | >25 | preF | 0.08 | VH3-48 | VL3-21 | 7 | 4 |
| ADI-41492 | 2849 | 1.82E−07 | 5.48E−08 | >25 | Both | 0.07 | VH1-69 | VK1-39 | 11 | 6 |
| ADI-41493 | 2849 | 4.50E−10 | 3.72E−10 | >25 | Both | 0.06 | VH5-51 | VL2-8 | 5 | 2 |
| ADI-41494 | 2849 | 2.61E−09 | 4.40E−10 | >25 | Both | 0.06 | VH3-49 | VL2-14 | 16 | 7 |
| ADI-41495 | 2849 | 7.72E−08 | 5.73E−08 | >25 | Both | 0.05 | VH3-15 | VL6-57 | 12 | 4 |
| ADI-41496 | 2849 | 1.65E−09 | 1.37E−09 | >25 | Both | 0.04 | VH1-8 | VL2-23 | 3 | 6 |
| ADI-41497 | 2849 | 1.44E−09 | 2.68E−10 | >25 | Both | 0.04 | VH3-30 | VL3-21 | 12 | 7 |
| ADI-41498 | 2849 | 1.22E−09 | 2.20E−10 | >25 | Both | 0.04 | VH3-21 | VL3-21 | 13 | 4 |
| ADI-41499 | 2849 | 1.99E−09 | 2.97E−10 | >25 | Both | 0.04 | VH3-43 | VL2-11 | 13 | 9 |
| ADI-41501 | 2849 | 3.21E−09 | N.B. | >25 | preF | 0.03 | VH1-69 | VK4-1 | 13 | 4 |
| ADI-41502 | 2849 | 1.34E−09 | 3.08E−10 | >25 | Both | 0.01 | VH1-69 | VL2-11 | 12 | 5 |
| ADI-41503 | 2849 | 3.14E−09 | 4.93E−10 | >25 | Both | 0.01 | VH3-23 | VL2-14 | 9 | 3 |
| ADI-41504 | 2849 | 2.80E−09 | 5.08E−10 | >25 | Both | 0.01 | VH4-59 | VL1-40 | 8 | 3 |
| ADI-41505 | 2849 | 2.87E−09 | 5.23E−10 | >25 | Both | 0.00 | VH4-34 | VL1-40 | 11 | 4 |
| ADI-41507 | 2849 | N.B. | 1.40E−07 | >25 | PostF | 0.00 | VH2-5 | VL1-40 | 4 | 5 |
| ADI-41508 | 2849 | 4.15E−09 | 5.55E−10 | 0.10 | Both | 0.00 | VH1-18 | VL3-1 | 13 | 6 |
| ADI-41515 | 2849 | 3.33E−10 | N.B. | >25 | preF | 0.00 | VH3-23 | VL3-10 | 13 | 7 |
| ADI-41516 | 2849 | 4.14E−10 | N.B. | 0.08 | preF | 0.00 | VH4-4 | VL1-47 | 16 | 7 |
| ADI-41517 | 2849 | 5.01E−10 | N.B. | 0.02 | preF | 0.00 | VH3-23 | VL1-40 | 10 | 4 |
| ADI-41518 | 2849 | 7.76E−10 | N.B. | >25 | preF | 0.00 | VH3-21 | VL1-40 | 2 | 0 |
| ADI-41519 | 2849 | 9.75E−10 | N.B. | >25 | preF | 0.00 | VH4-39 | VK3-20 | 15 | 2 |
| ADI-41520 | 2849 | 9.98E−10 | N.B. | >25 | preF | 0.00 | VH3-20 | VK1-39 | 6 | 8 |
| ADI-41521 | 2849 | 1.68E−09 | N.B. | >25 | preF | 0.00 | VH3-9 | VK3-20 | 9 | 11 |
| ADI-41522 | 2849 | 2.20E−09 | N.B. | >25 | preF | 0.00 | VH1-69 | VL2-14 | 10 | 5 |
| ADI-41523 | 2849 | 2.91E−09 | N.B. | >25 | preF | 0.00 | VH5-51 | VK1-39 | 6 | 2 |
| ADI-41524 | 2849 | 3.18E−09 | N.B. | >25 | preF | 0.00 | VH3-49 | VK2-28 | 6 | 3 |
| ADI-41525 | 2849 | N.B. | 3.27E−10 | >25 | PostF | 0.00 | VH1-69 | VL2-14 | 19 | 4 |
| ADI-41526 | 2849 | 3.01E−10 | 3.36E−10 | >25 | Both | 0.00 | VH1-2 | VL1-44 | 8 | 6 |
| ADI-41527 | 2849 | 7.12E−10 | 3.37E−10 | >25 | Both | 0.00 | VH3-7 | VK1-12 | 4 | 6 |
| ADI-41528 | 2849 | 2.28E−09 | 3.48E−10 | >25 | Both | 0.00 | VH3-30 | VL3-1 | 5 | 8 |
| ADI-41529 | 2849 | 1.03E−09 | 3.51E−10 | >25 | Both | 0.00 | VH1-69 | VK3-20 | 19 | 7 |
| ADI-41530 | 2849 | 1.91E−09 | 3.55E−10 | >25 | Both | 0.00 | VH1-8 | VL3-9 | 10 | 8 |
| ADI-41531 | 2849 | 2.08E−09 | 3.77E−10 | >25 | Both | 0.00 | VH3-23 | VK1-33 | 12 | 11 |
| ADI-41532 | 2849 | 1.92E−09 | 3.92E−10 | >25 | Both | 0.00 | VH5-51 | VL1-44 | 5 | 3 |
| ADI-41533 | 2849 | 1.47E−09 | 4.23E−10 | >25 | Both | 0.00 | VH3-30 | VL3-1 | 10 | 9 |
| ADI-41534 | 2849 | 3.31E−09 | 4.72E−10 | >25 | Both | 0.00 | VH3-30 | VL3-1 | 8 | 3 |
| ADI-41535 | 2849 | 1.93E−09 | 4.76E−10 | >25 | Both | 0.00 | VH2-70D | VK1-39 | 5 | 6 |
| ADI-41536 | 2849 | 3.05E−09 | 4.76E−10 | >25 | Both | 0.00 | VH4-34 | VL1-40 | 10 | 3 |
| ADI-41537 | 2849 | 2.58E−09 | 4.88E−10 | >25 | Both | 0.00 | VH3-23 | VK2-28 | 7 | 2 |
| ADI-41538 | 2849 | 3.44E−09 | 5.87E−10 | >25 | Both | 0.00 | VH3-21 | VK4-1 | 12 | 4 |
| ADI-41538 | 2849 | 3.44E−09 | 5.87E−10 | >25 | Both | 0.00 | VH3-21 | VK4-1 | 12 | 4 |
| ADI-41539 | 2849 | 3.38E−09 | 6.15E−10 | 0.18 | Both | 0.00 | VH1-18 | VK3-15 | 6 | 3 |
| ADI-41540 | 2849 | 3.54E−09 | 6.86E−10 | >25 | Both | 0.00 | VH4-34 | VK3-20 | 17 | 9 |
| ADI-41541 | 2849 | 2.47E−09 | 7.76E−10 | >25 | Both | 0.00 | VH2-5 | VL3-21 | 1 | 2 |
| ADI-41542 | 2849 | N.B. | 7.96E−10 | 0.69 | PostF | 0.00 | VH5-51 | VK1-33 | 9 | 9 |
| ADI-41543 | 2849 | 2.90E−09 | 7.96E−10 | >25 | Both | 0.00 | VH1-2 | VK2-28 | 16 | 4 |
| ADI-41544 | 2849 | N.B. | 8.05E−10 | >25 | PostF | 0.00 | VH5-51 | VK1-33 | 6 | 3 |
| ADI-41545 | 2849 | 1.36E−09 | 8.25E−10 | >25 | Both | 0.00 | VH4-59 | VL3-21 | 7 | 2 |
| ADI-41546 | 2849 | N.B. | 1.08E−09 | >25 | PostF | 0.00 | VH5-51 | VK1-9 | 4 | 1 |
| ADI-41547 | 2849 | 3.19E−09 | 1.08E−09 | 0.05 | Both | 0.00 | VH1-69 | VK3-20 | 11 | 7 |
| ADI-41548 | 2849 | 2.56E−09 | 1.45E−09 | >25 | Both | 0.00 | VH4-4 | VK3-15 | 13 | 5 |
| ADI-41549 | 2849 | 4.08E−10 | 1.56E−09 | >25 | Both | 0.00 | VH3-30 | VL2-14 | 5 | 2 |
| ADI-41550 | 2849 | 2.29E−10 | 2.57E−08 | >25 | Both | 0.00 | VH1-18 | VL3-21 | 10 | 2 |
| ADI-41551 | 2849 | 1.30E−08 | 2.38E−08 | >25 | Both | 0.00 | VH3-74 | VL3-1 | 8 | 8 |
| ADI-43643 | 2666 | 7.66E−08 | N.B. | >25 | preF | 0.10 | VH3-21 | VL1-40 | 0 | 0 |
| ADI-43644 | 2665 | 2.93206E−08 | N.B. | >25 | preF | 0.00 | VH3-23 | VK3-11 | 0 | 0 |
| ADI-43645 | 2666 | 8.70E−09 | N.B. | >25 | preF | 0.25 | VH1-69 | VK1-5 | 0 | 0 |
| ADI-43646 | 2635 | 5.34462E−09 | N.B. | >25 | preF | 0 | VH3-43D | VL2-14 | 0 | 1 |
| ADI-43647 | 2635 | N.B. | 4.4563E−08 | >25 | PostF | 0 | VH3-23 | VK1-12 | 3 | 0 |
| ADI-43648 | 2666 | N.B. | 2.86E−08 | >25 | PostF | 0.10 | VH1-8 | VL3-9 | 0 | 1 |

TABLE 7
Summary of antibody characteristics for antibodies isolated from PBMCs

| | | | | | | | | | VH | VL |
|---|---|---|---|---|---|---|---|---|---|---|
| | | RSV preF | RSV postF | Neutralization IC50 | | PSR | VH | VL | Protein | Protein |
| Name | Donor | binding KD | binding KD | (RSV subtype A) | Specificiity | score | Germline | Germline | Muts | Muts |
| ADI-36673 | 2635 | 6.20328E−10 | N.B. | 0.019954073 | preF | 0.00 | VH3-11 | VL1-40 | 7 | 5 |
| ADI-36675 | 2635 | 8.07354E−10 | N.B. | 0.006 | preF | 0.00 | VH3-23 | VL1-51 | 10 | 11 |
| ADI-36676 | 2635 | 2.82227E−10 | N.B. | 0.006 | preF | 0.00 | VH3-30 | VL3-21 | 10 | 5 |
| ADI-36678 | 2635 | 7.16249E−10 | N.B. | 0.006 | preF | 0.14 | VH3-66 | VL3-1 | 14 | 15 |
| ADI-41552 | 2635 | 3.44465E−09 | 5.21877E−10 | >25 | Both | 0.39 | VH3-48 | VK3-11 | 10 | 4 |
| ADI-41553 | 2635 | N.B. | 8.03693E−10 | >25 | postF | 0.22 | VH1-18 | VK1-5 | 7 | 1 |
| ADI-41554 | 2635 | 1.34614E−09 | 1.07074E−09 | >25 | Both | 0.21 | VH3-23 | VK1-5 | 8 | 7 |
| ADI-41555 | 2635 | 5.68885E−09 | 1.12393E−09 | 25 | Both | 0.20 | VH4-31 | VK3-11 | 8 | 7 |
| ADI-41556 | 2635 | N.B. | 2.27656E−09 | >25 | postF | 0.19 | VH3-21 | VK3-15 | 5 | 3 |
| ADI-41557 | 2635 | 3.08525E−08 | 8.61139E−08 | >25 | Both | 0.17 | VH4-59 | VK3-15 | 11 | 8 |
| ADI-41558 | 2635 | 3.01911E−09 | 7.00004E−10 | >25 | Both | 0.17 | VH3-11 | VK3-20 | 14 | 5 |
| ADI-41561 | 2635 | 3.32537E−09 | 5.15754E−10 | >25 | Both | 0.14 | VH2-5 | VK1-12 | 10 | 8 |
| ADI-41562 | 2635 | N.B. | 6.75971E−10 | >25 | postF | 0.12 | VH1-18 | VK3-15 | 20 | 6 |
| ADI-41563 | 2635 | 6.02208E−10 | N.B. | 0.032327297 | preF | 0.12 | VH4-59 | VL1-40 | 11 | 11 |
| ADI-41564 | 2635 | 4.43977E−09 | 5.95709E−10 | >25 | Both | 0.12 | VH1-69 | VK3-20 | 20 | 0 |
| ADI-41567 | 2635 | 7.16511E−10 | N.B. | 0.050532702 | preF | 0.11 | VH4-34 | VK1-9 | 12 | 4 |
| ADI-41568 | 2635 | N.B. | 2.0658E−09 | >25 | postF | 0.09 | VH4-34 | VL3-25 | 7 | 4 |
| ADI-41569 | 2635 | 3.29786E−09 | 1.60525E−09 | >25 | Both | 0.08 | VH1-69 | VK3D-15 | 10 | 7 |
| ADI-41570 | 2635 | 2.97345E−09 | 1.1235E−09 | 25 | Both | 0.08 | VH1-69 | VL1-51 | 11 | 6 |
| ADI-41571 | 2635 | 6.27081E−10 | N.B. | 0.031530527 | preF | 0.07 | VH3-11 | VL1-40 | 14 | 10 |
| ADI-41574 | 2635 | N.B. | 1.23235E−07 | >25 | postF | 0.02 | VH2-5 | VK1-5 | 1 | 7 |
| ADI-41576 | 2635 | N.B. | 1.42548E−09 | >25 | postF | 0.01 | VH2-5 | VK3-11 | 9 | 10 |
| ADI-41578 | 2635 | 2.48656E−10 | N.B. | 0.039833521 | preF | 0.00 | VH3-30 | VL3-21 | 11 | 12 |
| ADI-41579 | 2635 | 4.71437E−10 | 3.59718E−10 | 0.208709151 | Both | 0.00 | VH1-69 | VL2-14 | 15 | 13 |
| ADI-41580 | 2635 | 2.98246E−09 | 1.17422E−09 | 1.107269577 | Both | 0.00 | VH4-34 | VK4-1 | 10 | 10 |
| ADI-41581 | 2635 | 2.7729E−09 | 3.60691E−10 | >25 | Both | 0.00 | VH7-4-1 | VK2-28 | 10 | 4 |
| ADI-41582 | 2635 | N.B. | 9.11488E−10 | >25 | postF | 0.00 | VH4-31 | VL3-21 | 6 | 8 |
| ADI-41583 | 2635 | 6.63714E−10 | 3.80536E−10 | >25 | Both | 0.00 | VH1-69 | VK1-33 | 10 | 1 |
| ADI-41584 | 2635 | 3.08613E−09 | N.B. | >25 | preF | 0.00 | VH1-2 | VL1-40 | 10 | 5 |
| ADI-41585 | 2635 | 6.13E−10 | N.B. | 0.064052351 | preF | 0.00 | VH3-11 | VL1-40 | 6 | 3 |
| ADI-41586 | 2635 | 5.37539E−10 | 7.79176E−10 | 0.401663761 | Both | 0.00 | VH4-34 | VK2-28 | 9 | 3 |
| ADI-41587 | 2635 | 1.4048E−09 | 2.08899E−09 | 0.663851609 | Both | 0.00 | VH4-34 | VK2-28 | 8 | 5 |
| ADI-41588 | 2635 | 3.32826E−09 | 5.04922E−10 | >25 | Both | 0.00 | VH2-5 | VL3-1 | 5 | 2 |
| ADI-41589 | 2635 | 4.20258E−09 | N.B. | >25 | preF | 0.00 | VH3-23 | VK4-1 | 8 | 8 |
| ADI-41590 | 2635 | 3.0202E−09 | N.B. | >25 | preF | 0.00 | VH3-11 | VK1-39 | 7 | 10 |
| ADI-41591 | 2635 | 4.25861E−09 | N.B. | >25 | preF | 0.00 | VH3-11 | VL1-40 | 0 | 2 |
| ADI-41592 | 2635 | 3.73679E−09 | 4.40201E−10 | >25 | Both | 0.00 | VH7-4-1 | VL3-1 | 5 | 13 |
| ADI-41593 | 2635 | 1.8323E−09 | 5.29992E−10 | >25 | Both | 0.00 | VH5-51 | VK1-8 | 4 | 2 |
| ADI-41594 | 2635 | 4.13628E−10 | N.B. | 0.040569222 | preF | 0.00 | VH3-21 | VL1-40 | 10 | 4 |
| ADI-41595 | 2635 | 7.70076E−10 | N.B. | 0.047476327 | preF | 0.00 | VH3-30 | VK1-33 | 9 | 11 |
| ADI-41596 | 2635 | 3.04558E−10 | 4.37255E−10 | 0.053741113 | Both | 0.00 | VH4-34 | VK4-1 | 6 | 2 |
| ADI-41597 | 2635 | 3.56836E−10 | N.B. | 0.172508371 | preF | 0.00 | VH4-61 | VL3-21 | 6 | 3 |
| ADI-41598 | 2635 | 4.94657E−10 | N.B. | 0.174094146 | preF | 0.00 | VH4-59 | VK1-39 | 11 | 11 |
| ADI-41599 | 2635 | 7.90767E−10 | 4.32706E−10 | 0.636806381 | Both | 0.00 | VH3-48 | VK1-39 | 16 | 13 |
| ADI-41600 | 2635 | 4.93359E−09 | 7.54853E−10 | >25 | Both | 0.00 | VH3-30 | VK1D-12 | 15 | 9 |
| ADI-41601 | 2635 | 5.02595E−10 | N.B. | >25 | preF | 0.00 | VH3-11 | VL1-40 | 11 | 10 |
| ADI-41602 | 2635 | 2.85465E−09 | 4.54781E−10 | >25 | Both | 0.00 | VH4-59 | VL2-14 | 7 | 10 |
| ADI-41603 | 2635 | 3.49281E−09 | 4.89905E−10 | >25 | Both | 0.00 | VH3-49 | VK3-15 | 10 | 6 |
| ADI-41604 | 2635 | 1.7801E−08 | 2.92494E−08 | >25 | Both | 0.00 | VH1-2 | VK1-33 | 1 | 0 |
| ADI-41605 | 2635 | 3.18275E−09 | 5.5033E−10 | >25 | Both | 0.00 | VH4-31 | VK4-1 | 8 | 9 |
| ADI-41606 | 2635 | 3.38754E−09 | 1.02586E−09 | >25 | Both | 0.00 | VH4-61 | VK1D-12 | 9 | 7 |
| ADI-41607 | 2635 | 4.24282E−09 | 7.09182E−10 | >25 | Both | 0.00 | VH4-31 | VL2-11 | 7 | 11 |
| ADI-41608 | 2635 | 1.93484E−09 | 2.85427E−10 | >25 | Both | 0.00 | VH5-51 | VL6-57 | 15 | 3 |
| ADI-41609 | 2635 | 2.90676E−08 | N.B. | >25 | preF | 0.00 | VH1-46 | VL1-40 | 14 | 10 |
| ADI-41610 | 2635 | N.B. | 9.78084E−10 | >25 | postF | 0.00 | VH3-30 | VK1-39 | 12 | 1 |
| ADI-41611 | 2635 | 3.08502E−09 | 6.11386E−10 | >25 | Both | 0.00 | VH3-21 | VK1-39 | 6 | 6 |
| ADI-41626 | 2665 | 2.60E−09 | 8.91E−10 | >25 | Both | 0.17 | VH4-4 | VK1-39 | 9 | 9 |
| ADI-41644 | 2665 | 3.03E−09 | 1.10E−09 | >25 | Both | 0.11 | VH4-34 | VK3D-15 | 13 | 14 |
| ADI-41660 | 2665 | 2.94E−09 | 9.55E−10 | >25 | Both | 0.10 | VH1-69 | VL1-51 | 5 | 1 |
| ADI-41662 | 2665 | 5.24E−09 | 1.21E−09 | >25 | Both | 0.10 | VH5-51 | VL3-10 | 14 | 6 |
| ADI-41664 | 2665 | 2.94E−09 | 8.25E−10 | >25 | Both | 0.10 | VH1-18 | VL3-21 | 11 | 5 |
| ADI-41677 | 2665 | 1.28E−09 | 3.39E−10 | >25 | Both | 0.08 | VH2-70 | VK1-39 | 5 | 12 |
| ADI-41678 | 2665 | 2.92E−09 | 1.17E−09 | >25 | Both | 0.08 | VH3-30 | VL2-8 | 5 | 0 |
| ADI-41690 | 2665 | N.B. | 8.78E−09 | >25 | postF | 0.03 | VH5-51 | VK1-33 | 8 | 5 |
| ADI-41701 | 2665 | 1.93E−09 | 2.89E−10 | >25 | Both | 0.01 | VH5-51 | VL6-57 | 6 | 9 |
| ADI-41703 | 2665 | 4.20E−09 | 8.43E−10 | >25 | Both | 0.00 | VH4-30-2 | VK3-20 | 6 | 5 |
| ADI-41720 | 2665 | 2.20E−08 | 1.17E−09 | >25 | Both | 0.00 | VH3-33 | VK1-5 | 5 | 2 |
| ADI-41737 | 2665 | 3.58E−09 | 1.58E−09 | >25 | Both | 0.00 | VH4-30-4 | VK3-20 | 9 | 8 |
| ADI-41743 | 2665 | 5.45E−09 | 1.27E−09 | >25 | Both | 0.00 | VH4-30-2 | VK3-15 | 14 | 4 |
| ADI-41756 | 2665 | 2.90E−08 | N.B. | >25 | preF | 0.00 | VH3-30 | VL2-14 | 8 | 20 |
| ADI-41768 | 2666 | 1.61459E−09 | 3.38298E−10 | >25 | Both | 0.10 | VH3-9 | VL6-57 | 6 | 6 |
| ADI-41772 | 2666 | 7.10105E−10 | N.B. | 0.04 | preF | 0.10 | VH3-11 | VL3-10 | 12 | 7 |
| ADI-41778 | 2666 | 2.75256E−09 | 5.04199E−10 | >25 | Both | 0.10 | VH3-9 | VL2-11 | 5 | 4 |
| ADI-41781 | 2666 | 3.46456E−09 | 6.53361E−10 | >25 | Both | 0.07 | VH1-18 | VK1-27 | 16 | 4 |
| ADI-41783 | 2666 | 5.42456E−10 | N.B. | 0.25 | preF | 0.10 | VH1-18 | VK2-30 | 7 | 0 |
| ADI-41787 | 2666 | 1.56237E−09 | N.B. | 0.38 | preF | 0.10 | VH3-30 | VL3-10 | 7 | 6 |
| ADI-41788 | 2666 | 2.755E−10 | N.B. | 0.47 | preF | 0.10 | VH1-8 | VL3-21 | 8 | 1 |
| ADI-41790 | 2666 | 3.15261E−09 | N.B. | >25 | preF | 0.10 | VH1-69 | VK3-11 | 7 | 6 |
| ADI-41792 | 2666 | 2.98373E−08 | N.B. | >25 | preF | 0.10 | VH3-21 | VL1-40 | 2 | 1 |
| ADI-41794 | 2666 | 3.30922E−09 | 3.01006E−09 | >25 | Both | 0.10 | VH4-34 | VL1-51 | 0 | 3 |
| ADI-41799 | 2666 | 3.27629E−09 | 1.10141E−09 | >25 | Both | 0.14 | VH1-69 | VK1-5 | 17 | 5 |
| ADI-41800 | 2849 | 3.24E−09 | N.B. | >25 | preF | 0.40 | VH1-2 | VL2-14 | 10 | 5 |
| ADI-41803 | 2849 | 1.99E−09 | 7.11E−10 | >25 | Both | 0.17 | VH4-34 | VK1-17 | 16 | 6 |
| ADI-41804 | 2849 | 3.31E−10 | 4.36E−10 | >25 | Both | 0.15 | VH4-34 | VK1-27 | 11 | 5 |
| ADI-41805 | 2849 | N.B. | 2.00E−09 | >25 | postF | 0.14 | VH5-51 | VL2-14 | 4 | 7 |
| ADI-41807 | 2849 | 1.50E−09 | 1.19E−09 | >25 | Both | 0.14 | VH2-70 | VK1-39 | 6 | 10 |
| ADI-41808 | 2849 | 1.39E−08 | 2.25E−08 | >25 | Both | 0.14 | VH1-69 | VK1-5 | 21 | 7 |
| ADI-41809 | 2849 | 2.65E−09 | N.B. | >25 | preF | 0.12 | VH3-23 | VL1-47 | 9 | 5 |
| ADI-41810 | 2849 | 2.03E−09 | N.B. | >25 | preF | 0.11 | VH3-30 | VK3-15 | 7 | 8 |
| ADI-41811 | 2849 | 1.64E−09 | 7.44E−10 | >25 | Both | 0.11 | VH6-1 | VK3-11 | 10 | 7 |
| ADI-41812 | 2849 | 3.14E−10 | N.B. | 0.17 | preF | 0.11 | VH3-21 | VL1-40 | 6 | 1 |
| ADI-41814 | 2849 | 3.39E−09 | 9.15E−10 | >25 | Both | 0.10 | VH2-5 | VL1-40 | 3 | 13 |
| ADI-41815 | 2849 | 3.21E−09 | N.B. | >25 | preF | 0.10 | VH3-21 | VK2-28 | 9 | 0 |
| ADI-41816 | 2849 | 6.56E−10 | N.B. | 0.91 | preF | 0.10 | VH1-2 | VL3-1 | 8 | 2 |
| ADI-41817 | 2849 | 6.94E−09 | 1.58E−08 | >25 | Both | 0.09 | VH5-51 | VL2-14 | 7 | 9 |
| ADI-41818 | 2849 | 6.76E−10 | 3.47E−10 | >25 | Both | 0.03 | VH3-66 | VK3-20 | 8 | 2 |
| ADI-41820 | 2849 | 6.49E−08 | N.B. | >25 | preF | 0.01 | VH3-30 | VL7-46 | 11 | 4 |
| ADI-41827 | 2849 | 1.86E−10 | N.B. | >25 | preF | 0.00 | VH3-30 | VL3-1 | 10 | 7 |
| ADI-41828 | 2849 | 2.41E−10 | N.B. | 5.53 | preF | 0.00 | VH3-48 | VL3-21 | 9 | 0 |
| ADI-41829 | 2849 | 2.71E−10 | N.B. | 0.12 | preF | 0.00 | VH3-21 | VL1-40 | 5 | 2 |
| ADI-41830 | 2849 | 2.90E−10 | N.B. | 0.12 | preF | 0.00 | VH1-18 | VK2-28 | 13 | 0 |
| ADI-41831 | 2849 | 3.29E−10 | N.B. | 5.21 | preF | 0.00 | VH3-21 | VL1-40 | 8 | 3 |
| ADI-41832 | 2849 | 6.31E−10 | N.B. | 0.19 | preF | 0.00 | VH3-23 | VK3-20 | 8 | 4 |
| ADI-41833 | 2849 | 7.23E−10 | N.B. | 0.02 | preF | 0.00 | VH3-23 | VK1-27 | 7 | 6 |
| ADI-41834 | 2849 | 1.20E−09 | N.B. | 0.07 | preF | 0.00 | VH3-66 | VK1-33 | 9 | 5 |
| ADI-41835 | 2849 | 1.43E−09 | N.B. | 0.45 | preF | 0.00 | VH3-23 | VL3-1 | 3 | 4 |
| ADI-41836 | 2849 | 5.74E−09 | N.B. | >25 | preF | 0.00 | VH1-3 | VL1-40 | 9 | 8 |
| ADI-41837 | 2849 | 7.09E−09 | N.B. | >25 | preF | 0.00 | VH1-18 | VK2-30 | 4 | 3 |
| ADI-41838 | 2849 | 3.21E−08 | N.B. | >25 | preF | 0.00 | VH3-30 | VL2-14 | 8 | 3 |
| ADI-41839 | 2849 | 7.88E−09 | N.B. | >25 | preF | 0.00 | VH3-30 | VL3-21 | 14 | 2 |
| ADI-41840 | 2849 | 3.33E−09 | N.B. | >25 | preF | 0.00 | VH1-69 | VK3-15 | 17 | 3 |
| ADI-41841 | 2849 | 1.21E−10 | 2.65E−10 | 0.04 | Both | 0.00 | VH3-21 | VK1-33 | 6 | 8 |
| ADI-41842 | 2849 | 7.17E−10 | 4.42E−10 | >25 | Both | 0.00 | VH1-8 | VK1-39 | 14 | 6 |
| ADI-43638 | 2665 | N.B. | 9.93404E−09 | >25 | postF | 0.16 | VH4-34 | VK4-1 | 0 | 0 |
| ADI-43639 | 2635 | N.B. | 2.32551E−07 | >25 | postF | 0.00 | VH7-4-1 | VK1-39 | 0 | 0 |
| ADI-43640 | 2665 | 2.15586E−08 | N.B. | >25 | preF | 0.08 | VH3-21 | VL1-40 | 0 | 0 |
| ADI-43641 | 2665 | 3.74656E−08 | N.B. | >25 | preF | 0.09 | VH3-11 | VL1-40 | 0 | 0 |
| ADI-43642 | 2635 | 4.31745E−08 | N.B. | >25 | preF | 0.00 | VH3-21 | VL1-40 | 0 | 0 |

### Adenoid- and PBMC-Derived Antibodies Show Similar Levels of Polyreactivity

[0378] The specificity of each antibody was assessed using a previously described polyreactivity assay. In healthy adult donors, a relatively large proportion of memory B cell-derived antibodies have been shown to be polyreactive (Tiller, 2007). Consistent with these findings, approximately 35% of antibodies derived from both the adenoid and PBMC samples showed low levels of polyreactivity (FIG. 20A). The percentage of polyreactive clones was relatively similar across the different B cell subsets within each compartment, although the PBMC-derived IgG⁻IgA⁻CD27⁻B cell population showed a slighter higher proportion of polyreactive clones compared to many of the other B cell subsets (FIG. 20B). A slight enrichment for polyreactive clones was observed among the group of antibodies that bound with weak affinity to RSV F (FIG. 20C). In conclusion, the mucosal and systemic B cell compartments contain a similar proportion of polyreactive clones, with about a third of RSV F-specific B cells in both compartments showing some degree of polyreactivity.

### Discussion

[0379] A detailed understanding of mucosal and systemic immune responses to natural RSV infection can facilitate the design and evaluation of RSV vaccine candidates. Although previous studies have shown that mucosal antibody responses are important for protection against RSV in both humans and animal models, the specificities and functional activities of these antibodies have remained undefined. Furthermore, the anatomic location(s) and characteristics of RSV-specific memory B cells within mucosa-associated lymphoid tissues have not been thoroughly investigated. By collecting paired adenoid and blood samples from six young children undergoing elective tonsillectomy and using a high-throughput B cell cloning platform, the local and systemic B cell responses to natural RSV infection were analyzed and compared.

[0380] RSV F-specific B cell responses were observed in the adenoids of all 6 donors analyzed, whereas such responses were only detected in the peripheral blood samples of 4 of the 6 donors. In addition, in most donors studied, a higher proportion of adenoid-derived antibodies displayed high affinity binding and potent neutralizing activity compared to PBMC-derived antibodies. These results provide evidence that RSV-specific memory B cells are induced and maintained within adenoid tissue and suggest that this local response may be more robust and/or durable than the corresponding systemic response. Hence, adenoidectomy may result in a reduction of local immune competence against RSV, as previously demonstrated by diminished poliovirus-specific antibody levels in nasal secretions from children following tonsillectomy and adenoidectomy (Ogra P. L. (1971) Effect of tonsillectomy and adenoidectomy on nasopharyngeal antibody response to poliovirus. N. Engl. J. Med. 284:59-6).

[0381] The adenoids of all donors studied contained a high frequency of RSV F-specific memory B cells that displayed mutated v-regions but were not isotype-switched and lacked expression of the classical memory B cell marker CD27. Although RSV F-specific B cells that displayed this surface phenotype were also present in peripheral blood, the frequency was significantly lower than that observed in adenoid tissue and the majority of these B cells encoded antibodies that lacked somatic mutations. Unlike the tissue-based IgG⁺CD27⁻FCRL4⁺memory B cell population that has been previously described in human tonsils, the RSV F-specific IgG⁻IgA⁻CD27⁻B cells observed in the adenoids of these donors did not express FCRL4 or IgG and were highly heterogeneous with respect to IgM and IgD expression. Previous studies have also described atypical memory B cells in peripheral blood that are isotyped-switched, lack CD27 expression, and display lower levels of SHM compared to their CD27⁺counterparts. In contrast to this population, the atypical adenoid-derived memory B cell subset described here shows similar levels of SHM compared to classical IgG⁺CD27⁺memory B cells, suggesting similar antigenic selection characteristics. A single clonal lineage present in both adenoid and peripheral blood of one donor was identified, and the PBMC-derived clone originated from an IgG⁺CD27⁻B cell whereas the adenoid-derived clone originated from an IgG⁻IgA⁻CD27⁻B cell, suggesting a possible relationship between these two atypical B cell subsets. RSV F-specific IgA+ memory B cells were detected in both adenoid and peripheral blood for all donors.

[0382] Previous studies have shown that RSV antibodies that bind preF-specific surfaces are generally more potent than those that recognize epitopes expressed on both pre- and post-F or only on postF. Correspondingly, in the 4 young children analyzed here, over 90% of the neutralizing antibodies isolated from both adenoid and peripheral blood recognized epitopes exclusively expressed on preF. The high abundance of preF-specific neutralizing antibodies and near absence of postF-reactive neutralizing antibodies in adenoid tissue suggests that mucosal vaccines the preserve preF-specific antigenic surfaces may induce higher titers of protective antibodies than postF-based vaccines. Although the majority of mucosal vaccines are particle- or vector-based, it has been shown that preF can spontaneously trigger to adopt postF conformation on the viral surface, underscoring the importance of carefully evaluating the antigenic properties of such vaccine candidates. The extensive panel of antibodies described here could be used as reagents to measure the prefusion and postfusion F content of these vaccines.

[0383] Collectively, this demonstrates that 1) adenoids can serve as a major induction site for RSV-specific memory B cell responses and that a large proportion of this response is comprised of atypical IgM+ and/or IgD+ memory B cells; 2) the vast majority of adenoid-derived neutralizing antibodies target epitopes exclusively expressed on preF, which supports the development of preF-based mucosal vaccines that boost local responses.

### Methods

### Sample Collection

[0384] Heparinized blood and tonsillar tissue were collected from the patient after a planned therapeutic tonsillectomy for clinical indications (parental consent obtained during a pre-operative visit in accordance with approved IRB). Tonsillar tissue consisted of tonsils (palatine tonsils) and adenoids (pharyngeal tonsils), which together make up Waldeyer's ring.

[0385] After collection, tonsillar tissue was mechanically disrupted, e.g., grinding of tissue between the fritted glass at the end of microscope slides or by proteolytic digestion of the tissue typically with pronase, and mucosal lymphoid populations were isolated by standard methods, e.g., ficoll gradient. Several methods exist to recover secreted immunoglobulins from the mucosal surface of the tissue, e.g., Pope earwick or ex vivo culture systems. Peripheral blood was separated to recover plasma and then further fractionated to recover lymphoid cells.

[0386] Isolated lymphoid cells from paired tonsillar tissue and blood were used to identify and characterize monoclonal antibodies from single B cells.

### Production of RSV F Sorting Probes

[0387] PreF (DS-Cav1) and postF (F ΔFP) trimers were produced with a single biotinylated C-terminal AviTag and then coupled to streptavidin-PE or-APC, as described previously (Gilman et al, Sci Immunol 2016). Expression vectors containing a C-terminal 6x His-tag-AviTag or a C-terminal Strep-tag II were co-transfected into FreeStyle 293-F cells at a 1:2 ratio for each variant. The protein was purified from the cell supernatant using Ni-nitrilotriacetic acid (NTA) resin to remove trimers lacking the 6x His-tag-AviTag, then purified over StrepTactin resin. The resin was washed to remove trimers containing only one StrepTagII, and the remaining proteins were then biotinylated using birA (Avidity). The biotinylated proteins were separated from excess biotin by size-exclusion chromatography using a Superdex 200 column (GE Healthcare) in PBS.

### Single B Cell Sorting

[0388] PBMCs and adenoids from young children were stained using anti-human CD19 (APC-Cy7), CD20 (APC-Cy7), CD3 (PerCP-Cy5.5), CD8 (PerCP-Cy5.5), CD14 (PerCP-Cy5.5), CD16 (PerCP-Cy5.5), FcRL4 (PECy7), IgG (BV605), IgA (488), CD27 (BV421), and a mixture of dual-labeled preF and postF tetramers (25 nM each). To determine the percentage of RSV-F specific B cells expressing IgM or IgD, the adenoid samples were stained using human CD19 (APC-Cy7), CD20 (APC-Cy7), CD3 (PerCP-Cy5.5), CD8 (PerCP-Cy5.5), CD14 (PerCP-Cy5.5), CD16 (PerCP-Cy5.5), IgM (PECy7), IgD (BV510), IgG (BV605), IgA (488), CD27 (BV421), and a mixture of dual-labeled preF and postF tetramers (25 nM each). Tetramers were prepared fresh for each experiment, and total B cells binding to the RSV F tetramers were single cell sorted. Single cells were sorted using a BD FACS Aria II (BD Biosciences) into 96-well PCR plates (BioRAD) containing 20 uL/well of lysis buffer [5 uL of 5X first strand cDNA buffer (Invitrogen), 0.625 uL of NP-40 (New England Biolabs), 0.25 uL RNaseOUT (Invitrogen), 1.25 uL dithiothreitol (Invitrogen), and 12.6 uL dH2O]. Plates were immediately stored at −80° C.

### Amplification and Cloning of Antibody Variable Genes

[0389] Antibody variable genes (IgH, IgK, and IgL) were amplified by reverse transcription PCR and nested PCRs using cocktails of IgG-, IgA-, and IgM-specific primers, as described previously (Tiller et al, J Immunol 2008). The primers used in the second round of PCR contained 40 base pairs of 5′ and 3′ homology to the digested expression vectors, which allowed for cloning by homologous recombination into S. cerevisiae. The lithium acetate method for chemical transformation was used to clone the PCR products into S. cerevisiae (Gietz and Schiestl, Nat Protoc 2007). 10 uL of unpurified heavy chain and light chain PCR product and 200 ng of the digested expression vectors were used per transformation reaction. Following transformation, individual yeast colonies were picked for sequencing and characterization.

### Expression and Purification of IgGs

[0390] IgGs were expressed in S. cerevisiae cultures grown in 24-well plates, as described previously (Bornholdt et al, Science 2016). After 6 days, the cultures were harvested by centrifugation and IgGs were purified by protein A-affinity chromatography. The bound antibodies were eluted with 200 mM acetic acid/50 mM NaCl (pH 3.5) into ⅛th volume 2 M Hepes (pH 8.0), and buffer-exchanged into PBS (pH 7.0).

### Biolayer Interferometry Binding Analysis

[0391] IgG binding to preF (DS-Cav1) and postF (F ΔFP) was measured by biolayer interferometry (BLI) using a FortéBio Octet HTX instrument (Pall Life Sciences). For high-throughput KD determination, IgGs were immobilized on anti-human IgG quantitation biosensors (Pall Life Sciences) and exposed to 100 nM antigen in PBS with 0.1% BSA (PB SF) for an association step, followed by a dissociation step in PBSF. Data were analyzed using the FortéBio Data Analysis Software 7. Kd values were calculated for antibodies with BLI responses >0.1 nm, and the data were fit to a 1:1 binding model to calculate association and dissociation rate constants. The KD values were calculated using the ratio kd/ka.

### Polyreactivity Assay

[0392] Polyspecificity reagent binding was assessed as previously described (Xu et al, Protein Eng Des Sel 2013). Briefly, soluble membrane protein (SMP) and soluble cytosolic protein (SCP) fractions were prepared from Chinese hamster ovary cells and biotinylated with NHS-LC-Biotin reagent (Pierce, ThermoFisher Cat #21336). 2 million IgG-presenting yeast were transferred to a 96-well assay plate, pelleted to remove supernatant, then the pellets were resuspended in 50 uL of 1:10 diluted stock of biotinylated SCPs and SMPs and incubated on ice for 20 minutes. Cells were washed twice with ice-cold PB SF, and the samples were incubated in 50 uL of secondary labeling mix (Extravadin-R-PE, goat F(ab′) 2-anti human kappa-FITC, and propidium iodide) on ice for 20 minutes. The samples were analyzed for polyspecificity reagent binding using a FACSCanto II (BD Biosciences) with HTS sample injector. Flow cytometry data were analyzed for mean fluorescence intensity in the R-PE channel and normalized to three control antibodies exhibiting low, medium, and high MFI values.

### Plasma Neutralization Assay

[0393] Infant plasma samples were tested for RSV neutralization in microtiter assays using a recombinant RSV expressing Renilla luciferase (rA2-Rluc; a gift from Dr. Michael Teng, University of South Florida [Fuentes S, Crim R L, Beeler J, Teng M N, Golding H, Khurana S. Development of a simple, rapid, sensitive, high-throughput luciferase reporter based microneutralization test for measurement of virus neutralizing antibodies following Respiratory Syncytial Virus vaccination and infection. Vaccine. 2013 Aug. 20; 31(37):3987-94]). Hep2 cells were added to 96-well plates at a density of 1.8×104 cells per well in 100 □l of MEM with 2% FBS/1X penicillin-streptomycin solution (2% MEM) and allowed to adhere overnight at 37° C. On the day of the assay, plasma samples were serially diluted 2-fold (1:200 to 1:128,000) in 2% MEM containing rA2-Rluc and incubated for 30 min at 37° C. Culture media was aspirated from the Hep2 cells followed by the addition of 100 □□ per well of the plasma+rA2-Rluc mixture to duplicate wells. Cultures were maintained at 37° C. for 24 hrs and luciferase expression was quantified in cell lysates using the Renilla Luciferase Assay System (E2820, Promega, Madison, Wis.). Relative light units (RLU) were measured on a BioTek Synergy 2 microplate reader. Neutralization is expressed as the reciprocal of the highest plasma dilution to yield a 50% reduction in RLU as compared to control wells with no added plasma.

### Adenoid Neutralization Assay

[0394] Adenoid tissue collected on the day of surgery was placed in a sterile 10 cm culture dish. A 1.8 cm circular disc of soft absorbent filter paper (Leukosorb # BSP0669, Pall Corporation, Port Washington N.Y.) was applied to the mucosal surface of the tissue. One ml of PBS with added protease inhibitors (Bestatin 0.1 ug/ml; Aprotinin 1 ug/ml; AEBSF 0.5 ug/ml; Leupeptin 5 ug/ml; Millipore Sigma, St. Louis Mo.) was added to directly to the tissue to moisten the disc. The tissue was allowed to stand for 30 min at room temperature. Excess PBS+PI was then pipeted from the tissue into a 15 ml conical tube. The filter paper disc was collected with sterile forceps and placed into a separate 15 ml tube. An additional 0.5 ml of PB S+PI was added and the tube was centrifuged at 1,900×g rpm for 10 min. Supernatant recovered directly from the tissue and from the filter disc was retained and tested for RSV neutralizing activity. Supernatants were serially diluted 2-fold (1:4 to 1:256) and tested using the rA2-Rluc microtiter assay. Data is expressed as the dilution corresponding to a 50% inhibitory concentration (IC50) compared to control wells with rA2-Rluc alone.

### Example 3. Cluster Analysis of Neutralizing Antibodies According to Biophysical Characteristics

[0395] A set of RSV neutralizing antibodies were analysed for sequences of CDRH3 based on biophysical characteristics using a reduced alphabet scheme (Table 8).

The biophysical characteristics were classified as follows:
1. Group small amino acids with C-beta: AST
2. Backbone flexibility: G
3. Backbone rigidity: P
4. Positive charge: KR
5. Negative charge: ED
6. Medium sized polar NQH

### 7. Large Aromatic: FWY

### 8. Aliphatic: ILVMC

TABLE 8
Redcued alphabet consensus sequences of neutralizing antibodies

| | | | | | | | | Difference |
|---|---|---|---|---|---|---|---|---|
| | | | | | | | | from |
| | | | | | | | | Parent in |
| | | | | | | Cluster | Difference | Reduced |
| ADI-Name | Parent | VH_GL | VL_GL | H3 | H3 | Number | from Parent | alphabet |
| ADI-14583 | ADI-14583 | VH1-18 | VK2-30 | AREPPVIAAGDFQH | AREPPVIAAGDFQH | 1 | 0 | 0 |
| ADI-14336 | ADI-14583 | VH1-18 | VK2-30 | AREPPVIAAGDFQH | AREPPVIAAGDFQH | 1 | 0 | 0 |
| ADI-14402 | ADI-14583 | VH1-18 | VK2-30 | AREPPVIAAGDFSH | AREPPVIAAGDFSH | 1 | 1 | 1 |
| ADI-14576 | ADI-14583 | VH1-18 | VK2-30 | ARDPPVIAAGDFQH | ARDPPVIAAGDFQH | 1 | 1 | 0 |
| ADI-14577 | ADI-14583 | VH1-18 | VK2-30 | ARGPPVIAADDFQH | ARGPPVIAADDFQH | 1 | 2 | 2 |
| ADI-14585 | ADI-14583 | VH1-18 | VK2-30 | AREPPVIAAGDFPH | AREPPVIAAGDFPH | 1 | 1 | 1 |
| ADI-20975 | ADI-20975 | VH1-18 | VL3-21 | AREQFKWNDFYFDY | AREQFKWNDFYFDY | 2 | 0 | 0 |
| ADI-19422 | ADI-20975 | VH3-30 | VL3-21 | AKEDYNWNDYYFDY | AKEGYNWNDYYFDY | 2 | 5 | 2 |
| ADI-41788 | ADI-20975 | VH1-8 | VL3-21 | ARGFYKWNDWSFDY | ARGFYKWNDWSFDY | 2 | 5 | 3 |
| ADI-41191 | ADI-41191 | VH1-18 | VK2-30 | AREPPSLSAAATLDY | AREPPSLSAAATLDY | 3 | 0 | 0 |
| ADI-19501 | ADI-41191 | VH1-18 | VK2-30 | ARDPPSEGAAGLFDY | ARDPPSEGAAGLFDY | 3 | 6 | 5 |
| ADI-20962 | ADI-41191 | VH1-18 | VK2-30 | AREPPSDTAAGTGDY | AREPPSDTAAGTGDY | 3 | 4 | 3 |
| ADI-22757 | ADI-41191 | VH1-18 | VK2-30 | ARDPPAV-AASFMDV | ARDPPAV-AASFMDV | 3 | 8 | 3 |
| ADI-41424 | ADI-41191 | VH1-18 | VK2-30 | VRDTPAIAGAATLDF | VRDTPAIAGAATLDF | 3 | 8 | 3 |
| ADI-41454 | ADI-41191 | VH1-18 | VK2-30 | AREPPSTTAAATSDY | AREPPSTTAAATSDY | 3 | 3 | 2 |
| ADI-20964 | ADI-20964 | VH1-18 | VK2-30 | ARDVPVEAATSPEF | ARDVPVEAATSPEF | 4 | 0 | 0 |
| ADI-20988 | ADI-20964 | VH1-18 | VK2-30 | ARDVPVIAAHTFEY | ARDVPVIAAHTFEY | 4 | 5 | 3 |
| ADI-21050 | ADI-20964 | VH1-18 | VK2-30 | AREMGVDAAATFDY | AREMGVDAAATFDY | 4 | 9 | 2 |
| ADI-20974 | ADI-20974 | VH3-21 | VL1-40 | ARALMATAGGLAFDI | ARALMATAGGLAFDI | 5 | 0 | 0 |
| ADI-24839 | ADI-20974 | VH3-21 | VL1-40 | ARVLVATAYGNAFDI | ARVLVATAYGNAFDI | 5 | 4 | 3 |
| ADI-41203 | ADI-41203 | VH5-51 | VK3-15 | VSLYSDYDYGALDY | VSLYSDYDYGALDY | 6 | 0 | 0 |
| ADI-36680 | ADI-41203 | VH5-51 | VK3-15 | VSLFGDYDYGALDY | VSLFGDYDYGALDY | 6 | 2 | 1 |
| ADI-36681 | ADI-41203 | VH5-51 | VK3-15 | VTLYTDYDYGAPDH | VTLYTDYDYGAPDH | 6 | 4 | 2 |
| ADI-41344 | ADI-41344 | VH3-21 | VL1-40 | ARVSSPMIRGYYLDY | ARVSSPMIRGYYLDY | 7 | 0 | 0 |
| ADI-41343 | ADI-41344 | VH3-21 | VL1-40 | ARVDTPMVRGYYFDY | ARVDTPMVRGYYFDY | 7 | 4 | 2 |

### Example 4. Exemplary Antibodies

[0397] Antibodies were assessed for RSV neutralization activity and polyreactivity. A set of antibodies with exemplary characteristics are provided in Tables 9A-C.

TABLE 9A
Antibody binding and functional characteristics

| | | | neut IC50 | neut IC50 | neut IC50 | | | | |
|---|---|---|---|---|---|---|---|---|---|
| | | Neutralization - | (ug/ml) | (ug/ml) | (ug/ml) | | | | |
| Antibody | | RSV A2 IC50 | subtype A | subtype B | subtype A | | RSV PreF | RSV PostF | Polyreactivity |
| No. | ADI Name | (pM) | (graham) | (graham) | (wright) | Antigenic site | subtype A KD | subtype A KD | score |
| Ab 2 | ADI-14334 | 189.2 | 0.05 | 0.11 | | Site III | 3.2E−10 | N.B. | 0.00 |
| Ab 71 | ADI-14405 | 58.3 | 0.04 | 0.04 | | Site IV | 1.4E−10 | 1.2E−08 | 0.03 |
| | | | | | | (but preF-preferring) | | | |
| Ab 112 | ADI-14583 | 124.6 | 0.05 | 0.06 | | Site V | 4.7E−10 | N.B. | 0 |
| Ab 217 | ADI-20964 | 162.4 | 0.06 | 0.14 | | Site V | 3.6E−10 | N.B. | 0 |
| Ab 227 | ADI-20974 | 75.4 | 0.003 | 0.09 | | Site III | 2.9E−10 | N.B. | 0.11 |
| Ab 228 | ADI-20975 | 67 | 0.05 | 0.49 | | unknown | 9.2E−11 | 1.5E−10 | 0.03 |
| Ab 249 | ADI-20998 | 74 | 0.03 | >25 | | Site 0 | 2.6E−10 | N.B. | 0.11 |
| Ab 466 | ADI-36669 | 110.9 | | | 0.025 | | 1.1E−09 | N.B. | 0.01 |
| Ab 467 | ADI-36670 | 141 | | | 0.008 | | 7.5E−10 | N.B. | 0.01 |
| Ab 469 | ADI-36672 | 206.7 | | | 0.018 | Likely site III | 7.0E−10 | N.B. | 0.07 |
| Ab 470 | ADI-36674 | 189.8 | | | 0.014 | Likely site III | 7.5E−10 | N.B. | 0.01 |
| Ab 832 | ADI-36676 | 130.1 | | | 0.006 | | 2.8E−10 | N.B. | 0 |
| Ab 471 | ADI-36677 | 144.1 | | | 0.019 | | 5.4E−10 | N.B. | 0.05 |
| Ab 516 | ADI-41191 | 154.1 | | | 0.071 | Likely site V | 5.0E−10 | N.B. | 0.08 |
| Ab 527 | ADI-41203 | 23.9 | | | 0.006 | | 4.0E−10 | N.B. | 0.05 |
| Ab 532 | ADI-41208 | 310.5 | | | 0.077 | Likely site III | 4.8E−10 | N.B. | 0.04 |
| Ab 543 | ADI-41221 | 65.4 | | | 0.040 | | 3.0E−10 | 3.2E−10 | 0.01 |
| Ab 544 | ADI-41222 | 39.9 | | | 0.016 | | 4.3E−10 | N.B. | 0.01 |
| Ab 551 | ADI-41229 | 228.2 | | | 0.066 | | 1.1E−09 | 7.1E−10 | 0 |
| Ab 554 | ADI-41232 | 103.9 | | | 0.025 | Likely site V | 7.1E−10 | N.B. | 0.00 |
| Ab 571 | ADI-41249 | 51.7 | | | 0.006 | | 3.9E−10 | N.B. | 0 |
| Ab 578 | ADI-41256 | 85.8 | | | 0.019 | | 3.5E−10 | N.B. | 0.00 |
| Ab 581 | ADI-41259 | 122 | | | 0.015 | | 3.4E−10 | N.B. | 0.00 |
| Ab 592 | ADI-41274 | 26.6 | | | 0.109 | Likely site III | 4.8E−10 | N.B. | 0.10 |
| Ab 615 | ADI-41302 | 132.9 | | | 0.006 | | 6.5E−10 | N.B. | 0.03 |
| Ab 641 | ADI-41344 | 228.6 | | | 0.064 | Likely site III | 4.9E−10 | N.B. | 0 |
| Ab 843 | ADI-41563 | 139.3 | | | 0.032 | | 6.0E−10 | N.B. | 0.12 |
| Ab 868 | ADI-41594 | 208.3 | | | 0.041 | Likely site III | 4.1E−10 | Weak binder | 0 |
| | | | | | | | | (low response) | |
| Ab 870 | ADI-41596 | 179.7 | | | 0.054 | | 3.0E−10 | 4.4E−10 | 0 |

TABLE 9B
Antibody VH sequence information

| Anti- | VH | | | | | | | |
|---|---|---|---|---|---|---|---|---|
| body | Germ- | | | | | | | |
| No. | line | VH FR1 | VH CDR1 | VH FR2 | VH CDR2 | VH FR3 | VH CDR3 | VH FR4 |
| Ab 2 | VH3-11 | EVQLVESGGGLVK | VTVSSYYMT | WVRQAPGKGL | DISSSSTYTNYA | RFTISRDNAKSSLYL | ARLGITVTGVGYFDL | WGRGTLV |
| | | PGGSLRLSCAASG | | EFIS | DSVKG | QMNNLRAEDTAVYYC | | TVSS |
| Ab 71 | VH1-18 | QVQLVQSGTEVKK | YTFTNYDIS | WVRQAPGQGL | WISGSTGNTIYA | RLTMTTDTSTSTAYM | ARDNVGYASGNYFDY | WGQGTLV |
| | | PGASVKVSCKASG | | EWMG | QNLQG | ELRSLRSDDTAIYYC | | TVSS |
| Ab 112 | VH1-18 | QVQLVQSGAEVKE | YTFTNYGIS | WVRQAPGQGL | WISAYNGNIHYA | RVTMTTDTSTSTGFM | AREPPVIAAGDFQH | WGQGTLV |
| | | PGASVKVSCKASG | | EWLG | QKVQG | ELRSLRSDDTAVYYC | | TVSS |
| Ab 217 | VH1-18 | QVQLVQSGAEVKK | YTFTHYGIS | WVRQAPGQGL | WISAYNGNTNYA | RVTMTTDTSTSTAYM | ARDVPVEAATSPEF | WGQGTLV |
| | | PGASVKVSCKASG | | EWMG | QKLQG | EVRSLRYDDTAVYYC | | TVSS |
| Ab 227 | VH3-21 | EVQLVESGGGLVK | FSFSSYQIN | WVRQAPGKGL | SISGGSSYTDYA | RFTISRDNAKKSAEL | ARALMATAGGLAFDI | WGQGTMV |
| | | PGGSLRLSCAASG | | EWVS | DSIKG | QMKSLRADDTAVYYC | | TVSS |
| Ab 228 | VH1-18 | QVQLVESGTHVKK | DTFNNKGIV | WVRQAPGQGL | WIRPNNGNTKYA | RVTMTTDASTNTAYM | AREQFKWNDFYFDY | WGQGTLV |
| | | PGASVKVSCEASD | | EWMG | QKEQG | ELRSLRSGDTAVYYC | | TVSS |
| Ab 249 | VH3-33 | QVQLVQSGGGVVQ | FTLSTYGMH | WVRQAPGKGL | VIYYDESNKFYA | RFTISRDDSKNTLFL | ARESRPRGYSYSDFD | WGQGTLV |
| | | PGRSLRLSCAASG | | EWVA | DSVQG | QMNSLRAEDTAVYYC | S | TVSS |
| Ab 466 | VH1-46 | EVQLVQSGAEVKK | YTFTTYYIH | WVRQAPGQGL | MINPSGGTTSYA | RLTMTGDTSTSTVYM | TRDFIYFYGSGDGFD | WGQGTLV |
| | | PGASVRVYCKASG | | EWMG | QKFQG | ELNYLRSEDTAVYYC | Y | TVSS |
| Ab 467 | VH1-69 | QVQLVQSGAEVKK | GTFSTYTIN | WVRQAPGQGL | RITPSLGVPLSA | RITISADKSTTTAYM | ASLNYYDTTDYYLGY | WGQGTLV |
| | | PGSSVKVSCKASG | | EWMG | QKFQG | ELSSLGSEDTAVYYC | SDS | TVSS |
| Ab 469 | VH3-11 | EVQLVESGGGLVK | FAFNNYYMN | WVRQAPGKGL | SISSASTYTDYA | RFTISRDNAKNSLYL | ARDYYGSGNYYNPKP | WGQGTTV |
| | | PGGSLRLSCAASG | | EWVS | DSVKG | HLNSLRAEDTAVYYC | LDV | TVSS |
| Ab 470 | VH3-21 | EVQLLESGGGLVK | FKFRSYSMN | WVRQAPGKGL | SISSSSSYVDYA | RFTISRDNAENSLYL | ARAGSVPVAGTYNDY | WGQGTLV |
| | | PGGSLRLSCAASG | | EWVS | GSEKG | QMNSLRAEDTAMYYC | | TVSS |
| Ab 832 | VH3-30 | EVQLLESGGGVVQ | FSFRNYDMH | WVRQAPGKGL | IISYDGSNK- | RFTISRDTSKNTLYL | ARADSSGYYKGSEYF | WGQGTLV |
| | | PGRSLRLSCAASG | | EWVA | YADSVKG | QMNSLRVEDTAVYYC | QH | TVSS |
| Ab 471 | VH3-48 | QVQLVQSGGGLVQ | FTFSSYEMN | WVRQAPGKGL | YISSSGDTKYYA | RFTVSRDNAKYSLYL | ASLYDSRGYYWVFDY | WGQGTLV |
| | | PGGSLRLSCAASG | | EWIS | DSVKG | QMDSLRAEDTAVYYC | | TVSS |
| Ab 516 | VH1-18 | QVQLVQSGAEVKR | YIFSHYGIS | WVRQAPGQGL | WISAYNGNTNYA | RVTVTTDTSTSTAYM | AREPPSLSAAATLDY | WGQGTLV |
| | | PGASVKVSCKASG | | EWMA | QKLQG | ELRSLRSDDTAVYYC | | TVSS |
| Ab 527 | VH5-51 | QVQLVQSGAEVRK | YRFTNYWIG | WVRQMPGKGL | VIYPGDSDTRYS | QVTMSADKSTNTAYL | VSLYSDYDYGALDY | WGQGTLV |
| | | PGESLKISCKASG | | EWMG | PSFQG | QWSSLKASDTAIYYC | | TVSS |
| Ab 532 | VH3-11 | QVQLVESGGDLVK | FTLSGHYMS | WIRQPPGKGL | SISGSSTYTNYA | RFTISRDNAENSLYL | ARLAYSDYGPFYFDL | WGRGTLV |
| | | PGGSLRLSCAASG | | EWVS | DSVKG | QMNSLRAEDTAVYYC | | TVSS |
| Ab 543 | VH3-21 | EVQLLESGGGLVK | FTFSDYTMN | WVRQAPGKGL | SISITSSHIYYA | RFTISRDNAKNSLYL | ARELGFASSSYSYYY | WGQGTTV |
| | | PGGSLRLSCAASG | | EWVS | DSVKG | QINSLRAEDTAAYYC | GMDV | TVSS |
| Ab 544 | VH3-30 | QVTLKESGGGVVQ | FNFHNYAMH | WVRQAPGKGL | VISYDGSNKNFA | RFTISRDNSKNTLNL | VRDIVRGSPLFDY | WGQGTLV |
| | | PGRSQRLSCTASG | | EWVA | DSVKG | QMNNLRAEDTAVYYC | | TVSS |
| Ab 551 | VH3-30 | QVQLVDSGGGVVQ | FTFKSYGMH | WVRQAPGKGL | VISYDEINKYYA | RFTISRDYSKNTLSL | AKPKTTGYYYLDAFD | WGQGTMV |
| | | PGRSLKLSCAASG | | EWVA | DSVKG | QMNSLTTEDTAMYYC | F | TVSS |
| Ab 554 | VH1-18 | QVQLVQSGAEVKK | YTFTHYGIS | WVRQAPGQGL | WISAYNGNTNYA | RVTVTTDTSTSTAYM | ARDSMGGTTLFDY | WGQGTLV |
| | | PGASVKVSCKASG | | EWMA | QKLQD | ELRSLRSDDTALYYC | | TVSS |
| Ab 571 | VH5-51 | QVQLVQSGAEVKK | DTSTTYWIG | WVRQMPGKGL | IIFPGDSDTRYS | QVTISADKSIMTAYL | ATQALRGAFDI | WGQGTMV |
| | | PGESLKISCQVSR | | EWMG | PSFQG | QLTSLKASDTAMYYC | | TVSS |
| Ab 578 | VH1-69 | QVQLVQSGAEVKS | GTFGSYGIS | WVRQAPGQGL | AIMPMFGTINYA | RVTMTADESTSTVYM | VRDVFYDILTGYYDA | WGKGTTV |
| | | PGSSATVSCKASG | | EWIG | QKFQG | DVSSLRPDDTAVYYC | DYYHHYMDV | TVSS |
| Ab 581 | VH3-11 | QVQLVESGGRLVK | FTFSDFYMS | WIRQAPGKGL | YISSSGDDPNYA | RFTISRDNSKNSLYL | ARDEVGWNNLDYYFG | WGQGTTV |
| | | PGGSLRLSCAASG | | EWVS | DSVKG | QMNSLRAEDTAVYYC | MDV | TVSS |
| Ab 592 | VH3-21 | EVQLVESGGGLVK | FSFSSYAMN | WVRQAPGKGL | SISAGSSYIDYA | RFTISRDNAENSLFL | ARVGSYTHGYEFDY | WGQGTLV |
| | | PGGSLRLSCAASG | | QWVS | DSVKG | QMNSLRVEDTAVYYC | | TVSS |
| Ab 615 | VH3-30 | QVQLVESGGGVVQ | FTFSSYAMQ | WVRQAPGKGL | VMTNDGDDKYYA | RFTISRDNSKNTLYL | ARDLFEWWELLGYCY | WGQGTTV |
| | | PGRSLRLSCAASG | | EWVA | DSVRG | QMNNLRPEDTAVYYC | AMDV | TVSS |
| Ab 641 | VH3-21 | EVQLVESGGGLVK | SSFSSYYMN | WVRQAPGKGL | SISSSSTYIDYA | RFTISRDNAKNSLFL | ARVSSPMIRGYYLDY | WGQGTLV |
| | | PGGSLRLSCAASG | | EWVS | DSVKG | QMNSLRAEDTAVYYC | | TVSS |
| Ab 843 | VH4-59 | QVQLYESGPGLVK | DSITNNFWT | WIRQPPGKGL | YIYYSGSTNYNP | RITNSVDLSKNQFSL | ARLTSGGVDY | WGQGTLV |
| | | PSETLSLTCTVSD | | EWIG | SLKS | KLSSVTAADTAVYYC | | TVSS |
| Ab 868 | VH3-21 | EVQLVESGGGLVK | FSFSSYYMN | WVRQAPGKGL | SISPSSSYTNYA | RFTISRDNAKDSLYL | ARDGLLGITIFGVVQ | WGQGTLV |
| | | PGGSLRLSCAASG | | EWVS | DSVKG | QMNSLRAEDTAVYYC | DY | TVSS |
| Ab 870 | VH4-34 | QVQLQQWGAGLLK | DSFSGYFWT | WIRQPPGKGL | EINLSGSTNYNP | RVTILVDTSKNQFSL | ARGLHVSDDQDSSGY | WGQGTLV |
| | | PSETLSLTCAVYG | | EWIG | SLKS | KLSSVTAADTAVYYC | YFHPGSFDY | TVSS |

TABLE 9C
Antibody VL sequence information

| Anti- | VL | | | | | | | |
|---|---|---|---|---|---|---|---|---|
| body | Germ- | | | | | | | |
| No. | line | VL FR1 | VL CDR1 | VL_FR2 | VL CDR2 | VL FR3 | VL CDR3 | VL FR4 |
| Ab 2 | VL1-40 | QPGLTQPPSVSGA | TGSSSNIGAGY | WYQQLPGTAP | DNNNRPS | GVPDRFSGSKSGTSASL | QSYDSSLSNYV | FGTGTKL |
| | | PGQRVTISC | DVH | KLLIN | | AITGLQVEDEADYYC | | TVL |
| Ab 71 | VL3-21 | SYVLTQPPSVSVA | GGNNIGSKSVH | WYQQRPGQAP | YDSVRPS | GIPERFSGSNSGNTATL | QVWDSSRDHEV | FGGGTKL |
| | | PGKTARIPC | | VLVIY | | TISTVEAGDEADPYC | | TVL |
| Ab 112 | VK2-30 | ETTLTQSPLSLPV | RSSQSLVHSNG | WFQQRPGQSP | RVSNRDS | GVPDRFSGSGSGTDFTL | MQGTHWPPD | FGQGTRL |
| | | TLGQPASISC | NTYLS | RRLIY | | KISRVEAEDVGLYYC | | EIK |
| Ab 217 | VK2-30 | DIVMTQTPLSLPV | RSSQSLVYSDG | WFQQRPGQSP | KVSNRDS | GVPNRFSGSGSGTDFTL | VQNTHWPAYT | FGQGTKV |
| | | TLGQPASISC | NTYLS | RRLIY | | KISRVEAEDVGVYYC | | EIK |
| Ab 227 | VL1-40 | QPVLTQPPSVSGA | TGSGSNIGAGY | WYQQVPGTAP | RNTNRPS | GVPDRFSGSKSGTSASL | QSYDRSLSVV | FGGGTKL |
| | | PGQRVTISC | DVH | KLLIL | | AITGLQAEDEADYYC | | TVL |
| Ab 228 | VL3-21 | SYELMQPPSVSVA | GGSNIGSETVH | WYQQKPGQAP | DDTDRPS | GIPERFSGSNSGNTATL | QVRDSRTDDVV | FGGGTKL |
| | | PGQTATITC | | VLVVH | | TISGVEAGDEADFYC | | TVL |
| Ab 249 | VL2-11 | QPGLTQPRSVSGS | TGTSSDVGTFN | WYQQHPGKAP | DVNQRPS | GVPDRFSGSKSGNTASL | CAYAGYYS | FGGGTKL |
| | | PGQSVTISC | YVS | KLMIY | | TISGLQAEDEADYYC | | TVL |
| Ab 466 | VK1-17 | EICMTQSPSAMSA | RASQGISNYLA | WFQQKPGKVP | AASSLQS | GVPSRFSGSGSGTEFTL | LQHNSYPFT | FGPGTKV |
| | | SVGDRVTITC | | KRLIY | | TITSLQPEDFATYYC | | EIK |
| Ab 467 | VK3-15 | DIVLTQTPATLSV | RASHSVSNNLA | WYQQKPGQAP | SASTRAT | GIPARFSGRGSGTEFTL | QQYNNWPPEYT | FGQGTKV |
| | | SPGERATLSC | | RLLIY | | TISSLQPEDFAVYYC | | DIK |
| Ab 469 | VL1-40 | QPVLTQPPSVSGA | TGSSSNIGAGY | WYRQFPGTAP | GNTNRPS | GVPDRFSGSKSGTSASL | QSYDSSLKGV | FGGGTKL |
| | | PGQRVTISC | DVH | ELLIY | | AITGLQAEDEADYYC | | TVL |
| Ab 470 | VL1-40 | QSVLTQPPSVSGA | TGSSSNIGAGY | WYQHLPGTAP | GNNNRPA | GVPDRFSGSKSGTSASL | QSYDRSLSVL | FGGGTKV |
| | | PGQRVTISC | DVH | KLLIH | | VITGLQADDEADYYC | | TVL |
| Ab 832 | VL3-21 | SYELTQLPSVSVA | GGNNIGTKSVQ | WYQHKPGQAP | DDSDRPS | DIPERFSGSNSGNTATL | QVWDSSSDHYV | FGTGTKL |
| | | PGQTARITC | | VLVVY | | TISRVEAGDEADYYC | | TVL |
| Ab 471 | VK1-33 | DIVMTQSPSSLSA | QASQDISTYLN | WYQHKPGKAP | DASNLEP | GVPSRFSGSGSGTDFTF | LQHDNLPPT | FGQGTKV |
| | | SVGDRVTITC | | NLLIY | | TISSLQPEDIATYYC | | DIK |
| Ab 516 | VK2-30 | EIVMTQSPLSLPV | RSNQSLVYSDG | WFQQRPGQSP | KVSNRDS | GVPDRFSGSGSGTDFTL | MQVTHWPHE | FGQGTKL |
| | | TLGQPASISC | NIYLS | RRLIY | | KISRVEAEDVAVYYC | | EIK |
| Ab 527 | VK3-15 | EIVMTQSPATLSV | RASENVGRNLA | WYQQKPGQAP | GASIRAT | GILARFSGSGSGTEYTL | QQYHDWPSFT | FGPGTKV |
| | | SPGERATLSC | | RLLIY | | TISSLQSEDFAVYYC | | DIK |
| Ab 532 | VL1-40 | QSVLTQPPSVSGA | TGSSSNIGAGY | WYQQLTGTAP | DNNNRPS | GVPDRFSGSKSGTSASL | QSYDSRLSAPYV | FGTGTKL |
| | | PGQRVTISC | DVH | KLLIF | | AITGLQAEDEADYYC | | TVL |
| Ab 543 | VL2-11 | QSALTQPRSVSGS | TGTSSDVGDYN | WYQQHPGTAP | DVTQRPS | GVPDRFSGSKSANTASL | CCSFAGNYV | FGTGTKV |
| | | PGQSVTISC | SVS | KLIIF | | TISGLQPEDEADYY- | | TVL |
| Ab 544 | VL3-21 | QPVLTQPPSLSVA | GGNNIGSKIVH | WYQQKPGQAP | DDDDRPS | GIPERFSGSNSGNTATL | QVWDRSSDNYV | FGTGTKV |
| | | PGQTAWITC | | VVVVY | | TIRRVEVGDEADYYC | | SVL |
| Ab 551 | VK1-33 | ETTLTQSPSSLSA | QASQDISNYLN | WYQQKPGKAP | DASNLET | GVPSRFSGSGSGTDFTF | QQHDNVPPT | FGQGTKV |
| | | SVGDRVTITC | | KLLIY | | TISSLQSEDIATYYC | | DIK |
| Ab 554 | VK2-30 | DIVLTQTPLSLPV | RSSQSLVYSDG | WFQQRPGQSP | KVSNRDS | GVPDRFTGSGSGTDFTL | MQGTHWPPMYT | FGQGTKL |
| | | TLGQPASISC | NTYLN | RRLIY | | KISRVEAEDVGVYYC | | EIK |
| Ab 571 | VK1-33 | DIRLTQSPSSLSA | QASQDISNYLN | WYQQKPGKAP | DASYLET | GVPSRFSGSGSGTDFTF | QQYDDLLFT | FGPGTKL |
| | | SVGDRVTITC | | KLLIY | | TISSLQPEDFATYYC | | EIK |
| Ab 578 | VK2-30 | DIVMTQSPLSLPV | RSGQSLVHSDG | WFQQRPGQSP | KVSNRGS | GVPDRFSGSGSGTDFTL | MQGTHWPRT | FGQGTKV |
| | | TLGQPASISC | NTYLN | RRLIY | | KISRVEAEDVGVYFC | | DIK |
| Ab 581 | VK2-30 | DIVMTQSPLSLPV | RSSQSLVHSDG | WFHQRPGQSP | KVSNRDS | GVPNRFSGGGSGTDFTL | MQGTHWQKT | FGQGTKV |
| | | TLGQPASISC | NTYLS | RRLIY | | KISRVEAEDVGFFYC | | EIK |
| Ab 592 | VL1-40 | QPVLTQPPSVSGA | TGSNSNIGAGY | WYQQLPGTAP | ASTIRPS | GVPDRFSGSKSGTSASL | QSYDRNLSVV | FGGGTKV |
| | | PGQRVTISC | DVH | KLLIY | | AITGLQAEDEADYYC | | TVL |
| Ab 615 | VL2-8 | QSVLTQPPSASGS | TGTSSDVGAYN | WYQQHPGKAP | EVYKRPS | GVPDRFFGSKSGNTASL | SSYAGSNTLGV | FGGGTKV |
| | | PGQSVTISC | YVS | KLIIY | | TVSGLQAEDEADYYC | | TVL |
| Ab 641 | VL1-40 | QPVLTQPPSVSGA | TGSSSNIGAGY | WYQQLPGTAP | GNSNRPS | GVPDRFSGSKSGTSASL | QSYDSSLSGSV | FGGGTKL |
| | | PGQRVTISC | DVH | KLVIH | | AITGLQDEDEADYYC | | TVL |
| Ab 843 | VL1-40 | QSVLTQPPSLSGA | TGSSSNIGADY | WYQQLPGTAP | QNTNRPS | GVPDRFSASKSGTSVSL | QSYDSSLSAWV | FGGGTKL |
| | | PGQRVTISC | HVH | KLLIY | | AITGLQAEDEADYYC | | TVL |
| Ab 868 | VL1-40 | QSVVTQPPSVSGA | TGSSSNIGAGY | WYQQLPGTAP | GNTNRPS | GVPDRFSASKSGTSASL | QSYDSSLSVV | FGGGTKL |
| | | PGQRVTISC | DVH | KLLIY | | AITGLQAEDEADYYC | | TVL |
| Ab 870 | VK4-1 | DIRMTQSPDSLAV | KSSQSVLYSSN | WYQQKPGQPP | WASTRES | GVPDRFSGSGSGTDFTL | QQYYSTPLT | FGGGTKV |
| | | SLGERATINC | NKNYLA | KLLIN | | AISSLQAEDVAVYYC | | EIK |

[0398] An informal sequence listing is provided below in Table 5.

TABLE 5
Informal Sequence Listing

| Antibody | SEQ ID | | | |
|---|---|---|---|---|
| No. | NO: | Sequence | Clone # (ADI) | Descriptors |
| Ab 1 | 1 | EVQLVETGGGLVKPGGSLRLSCADSGFPFSSYSMHWVRQAPGKGLEWVASISSSSS | ADI-14333 | Heavy chain variable region |
| | | FINYADSVKGRFTISRDNAKNSLYLQMNSLRAEDTAVYFCAREAACGGDCYGYYFD | | (“HC”) amino acid sequence |
| | | YWGQGTLVTVSS | | |
| Ab 1 | 2 | QSVVTQPPSASGAPGQRVTISCTGSSSNIGAGYDVHWYQQLPGTAPKVLISGNSNR | ADI-14333 | Light chain variable region |
| | | PSGVPARFSGSKSGTSASLAITGLQAEDEADYYCQSYDSSLSGSVEGGGTQLTVL | | (“LC”) amino acid sequence |
| Ab 2 | 3 | EVQLVESGGGLVKPGGSLRLSCAASGVTVSSYYMTWVRQAPGKGLEFISDISSSSTY | ADI-14334 | Heavy chain variable region |
| | | TNYADSVKGRFTISRDNAKSSLYLQMNNLRAEDTAVYYCARLGITVTGVGYFDLWG | | (“HC”) amino acid sequence |
| | | RGTLVTVSS | | |
| Ab 2 | 4 | QPGLTQPPSVSGAPGQRVTISCTGSSSNIGAGYDVHWYQQLPGTAPKLLIHDNNN | ADI-14334 | Light chain variable region |
| | | RPSGVPDRFSGSKSGTSASLAITGLQVEDEADYYCQSYDSSLSNYVFGTGTKLTVL | | (“LC”) amino acid sequence |
| Ab 3 | 5 | EVQLVESGGGLVQPGRSLRLSCTASGFTFGDYAMSWVRQAPGKGLEWVGFIRSN | ADI-14335 | Heavy chain variable region |
| | | AFGGTSEYAASVKGRFTISRDDSKSIAYLQMNSLKTEDTAVYYCTRDGIHDYGDSYY | | (“HC”) amino acid sequence |
| | | YYGMDVWGQGTTVTVSS | | |
| Ab 3 | 6 | DIQLTQSPSSLSASVGDRVTITCRASQTVTTYLNWYQQKPGKAPKLLIYGASSLQSG | ADI-14335 | Light chain variable region |
| | | VPSRFSGSGSGTDFTLTINSLQPEDFATYYCQQTYSTVTFGPGTKVEIK | | (“LC”) amino acid sequence |
| Ab 4 | 7 | EVQLLESGGEVKKPGASVKVSCKASGYTFTNYGISWVRQAPGQGLEWMGWISAY | ADI-14336 | Heavy chain variable region |
| | | NGNTNYAQKLQGRVTMTTDTSTSTAYMEVRRLRSDDTAVYYCAREPPVIAAGDFQ | | (“HC”) amino acid sequence |
| | | HWGQGTLVTVSS | | |
| Ab 4 | 8 | DIVMTQTPLSLPVTLGQPASISCRSSQSLVHSDTNIYLSWFQQRPGQSPRRLIYKVSN | ADI-14336 | Light chain variable region |
| | | RDSGVPDRFSGSGSGTDFTLRISRVEAEDVGVYYCMQGTHWPPDFGQGTRLEIK | | (“LC”) amino acid sequence |
| Ab 5 | 9 | EVQLVESGGGLVKPGGSLRLSCAASGFTFSSYSMNWVRQAPGKGLEWVSSISSSSS | ADI-14337 | Heavy chain variable region |
| | | YIYYADSVKGRFTISRDNAKNSLYLQMNSLRAEDTAVYYCAREYYDSSGYTNWFDP | | (“HC”) amino acid sequence |
| | | WGQGTLVTVSS | | |
| Ab 5 | 10 | QPVLTQPPSVSGAPGQRVTISCTGSSSNIGAGYDVHWYQQLPGTAPKLLIYGNSNR | ADI-14337 | Light chain variable region |
| | | PSGVPDRFSGSKSGTSASLAITGLQAEDEADYYCQSYDSSLAWVEGGGTQLTVL | | (“LC”) amino acid sequence |
| Ab 6 | 11 | EVQLVESGGGVVQPGRPLRLSCAASGFTFSTYDLYWVRQAPGKGLDWVAIISPDG | ADI-14338 | Heavy chain variable region |
| | | NKKYYADSVKGRFTISRDNSKNTLFLHMNSLRAEDTAVYYCARDYGNYFGSGSYYR | | (“HC”) amino acid sequence |
| | | YFDLWGRGTLVTVSS | | |
| Ab 6 | 12 | DIQLTQSPSSLSASVGDRVTITCRASQSISSHLNWYQQKPGKAPKLLIYASSSLQSGV | ADI-14338 | Light chain variable region |
| | | PSRFSGSGSGTDFTLTISGLQPEDFATYYCQQSYSTPFTFGPGTKVEIK | | (“LC”) amino acid sequence |
| Ab 7 | 13 | QVQLVESGGGVLQPGRSLRLPCEASGFTFNKYAMHWVRQAPGKGLEWVAAVSY | ADI-14339 | Heavy chain variable region |
| | | DGGNKFYAESVKGRFTISRDNSKNTLYLQMNSLKPEDTAVYYCARDRWELLHGLDY | | (“HC”) amino acid sequence |
| | | WGLGTLVTVSS | | |
| Ab 7 | 14 | SYELTQPPSVSVSPGQTARITCSGEALAKQYAYWYQQKPGQAPVLVIYKDNERPSGI | ADI-14339 | Light chain variable region |
| | | SERFSGSSSGTTVTLTISGVQAEDEADYYCQSADSSGTYVFGTGTKVTVL | | (“LC”) amino acid sequence |
| Ab 8 | 15 | EVQLVESGGGLVKPGGSLRLSCAASGFTLSSYTMNWVRQAPGRGLEWVSSIYSTSS | ADI-14340 | Heavy chain variable region |
| | | YIYYADSVKGRFTISRDNAKNSLYLQMNSLRAEDTAVYYCARDSQAVTGTDLYFDS | | (“HC”) amino acid sequence |
| | | WGQGTLVTVSS | | |
| Ab 8 | 16 | QPGLTQPPSVSVAPGKTARITCGGNNIGRKNVHWYQQKPGQAPILVIYYDSDRPS | ADI-14340 | Light chain variable region |
| | | GIPERFSGSNSGNTATLTISRVEDGDEADYYCQVWDSSNDHVIFGGGTQLTVL | | (“LC”) amino acid sequence |
| Ab 9 | 17 | QVQLVQSGGGLVQPGGSLRLSCAGSGFTFSDYEMNWVRQAPGKGLEWLSYISSS | ADI-14341 | Heavy chain variable region |
| | | GSIIYYADSVKGRFTISRDNAKNSLYLQMNSLRAEDTGLYYCARANHRHYYGMDV | | (“HC”) amino acid sequence |
| | | WGQGTTVTVSS | | |
| Ab 9 | 18 | DIRLTQSPSTLSASVGDRVTITCRASQSIGSWLAWYQQKPGKAPKLLIYKASSLESGV | ADI-14341 | Light chain variable region |
| | | PSRFSGSGSGTEFTLTISSLQPDDFATYYCQQYNSYSYTFGRGTRLEIK | | (“LC”) amino acid sequence |
| Ab 10 | 19 | QVTLKESGPVLVKPTETLTLTCTVSGFSLSNAKMGVSWIRQPPGKALEWLAYISSND | ADI-14342 | Heavy chain variable region |
| | | EKSYSTSLKSRLTISKDTSKSQVVLTMTNMDPVDTATYYCARILLYDSSGYYLWYFDL | | (“HC”) amino acid sequence |
| | | WGRGTLVTVSS | | |
| Ab 10 | 20 | DIQVTQSPSSLSASVGDRVTITCRASQRITSYLNWYQHKPGKAPKLLIFAASSLHSGV | ADI-14342 | Light chain variable region |
| | | PSTFSGSGSGTDFTLTISSLQPEDFATYYCQQSYSTPWTFGQGTKVEIK | | (“LC”) amino acid sequence |
| Ab 11 | 21 | QVQLVQSGAEVKKPGSSVKVSCKASGGTFSSYGVNWVRQAPGQGLEWMGRIIP | ADI-14343 | Heavy chain variable region |
| | | MFGTSNYAQKFQGRVTITADGSTSTAYMELSSLRSEDTAVYYCARVGSPTTGAIMG | | (“HC”) amino acid sequence |
| | | VWGQGTTVTVSS | | |
| Ab 11 | 22 | DIVLTQTPLSLPVTPGEPASISCRSSQSLLQSNGFNYLDWYLQKPGQSPKLLIYMGSN | ADI-14343 | Light chain variable region |
| | | RASGVPDRFSGSGSGTDFTLIISRVEAEDVGVYYCMQAIESPLTFGGGTKVDIK | | (“LC”) amino acid sequence |
| Ab 12 | 23 | QVQLVQSGGGLVQPGGSLRLSCAASGFTFRTYALSWVRQAPGKGLEWVSSILGSG | ADI-14344 | Heavy chain variable region |
| | | GSTYYADSVKGRFTISRDNSKNTLYLQLNSLRAEDTAVYFCAKLAVAGLLHHYYGLD | | (“HC”) amino acid sequence |
| | | VWGQGTTVTVSS | | |
| Ab 12 | 24 | SYELTQPPSVSVSPGQTASITCSGDKLENKYACWYQQKPGQSPVLLIYQDTKRPSGI | ADI-14344 | Light chain variable region |
| | | PERFSGSNSGTTATLTISGTQALDEADYYCQAWDSSTASVLFGGGTQLTVL | | (“LC”) amino acid sequence |
| Ab 13 | 25 | QITLKESGAEVKKPGASVKVSCKVSGYTLSDFSMHWVRQAPGKGLEWMGSFDPE | ADI-14345 | Heavy chain variable region |
| | | DGETVDAQKFQGRVTMTEDRSTATAYMELRSLRSEDTAVYYCGTPASAGQVDYW | | (“HC”) amino acid sequence |
| | | GQGTLVTVSS | | |
| Ab 13 | 26 | DIVLTQSPSSLSASVGDRVTITCRASQSISSYLHWYQQKPGKAPKLLIYAASSLQSGVP | ADI-14345 | Light chain variable region |
| | | SRFSGSGSGTDFTLTISSLQPEDFATYYCQQSYITPYTFGQGTKLEIK | | (“LC”) amino acid sequence |
| Ab 14 | 27 | EVQLLESGGGLVKPGGSLRLSCAASGFRFSSYSMNWVRQAPGKWLEWVSSISASSS | ADI-14346 | Heavy chain variable region |
| | | YTDYADSVKGRFTISRDNAKNSLYLQMNSLRAEDTAVYYCAREDYLSSGSLLHWFD | | (“HC”) amino acid sequence |
| | | PWGQGTLVTVSS | | |
| Ab 14 | 28 | QPVLTQPPSVSGAPGQRVTISCTGSSSNIGAGYDVHWYQQLPGTAPKLLIYGNNNR | ADI-14346 | Light chain variable region |
| | | PSGVPDRFSGSKSGTSASLAITGLQAEDEADYYCQSYDSRLSVLFGGGTKVTVL | | (“LC”) amino acid sequence |
| Ab 15 | 29 | EVQLVESGGGLVKPGGSLRLSCAASGFTFRDYYMNWIRQAPGKGLEWVSDISASSS | ADI-14347 | Heavy chain variable region |
| | | YTNYADSVKGRFTISRDNAKTSLYLQMNSLRAEDTAVYYCAREVVTAMGGYYFDY | | (“HC”) amino acid sequence |
| | | WGQGTLVTVSS | | |
| Ab 15 | 30 | QSVVTQPPSVSGAPGQRVTISCTGSSSNIGAGYDVHWYQQLPGTAPKLLIYGNNN | ADI-14347 | Light chain variable region |
| | | RPSGVPDRFSGSKSGTSASLAITGLQAEDEADYYCQSYDSSLSGSGVFGTGTKVTVL | | (“LC”) amino acid sequence |
| Ab 16 | 31 | QVQLVESGGGVAQPGGSLRLSCVASGFTFSNYGMHWVRQAPGKGLEWVAFIRSD | ADI-14348 | Heavy chain variable region |
| | | GSKKYYGDSGKGRFTISRDNSKNTLYLQMNSLRAEDTALYYCARERAGATFAFDIW | | (“HC”) amino acid sequence |
| | | GQGTTVTVSS | | |
| Ab 16 | 32 | QSALTQPRSVSGSPGQSVTISCTGTSSDVGGYNFVSWYQHHPGKAPKLMIYDVTN | ADI-14348 | Light chain variable region |
| | | RPSGVPDRFSGSKSGNTASLTISGLQADDEADYYCCSYAGGFTFYVFGTGTKVTVL | | (“LC”) amino acid sequence |
| Ab 17 | 33 | EVQLVESGAEVKKPGSSVKVSCKASGGTLSSYAFSWVRQAPGQGLEWMGGVIPIS | ADI-14349 | Heavy chain variable region |
| | | ATSDYAQKFQGRVTITADESTSTVYMELRSLRSEDTAVYYCARDTRYSSGWFYDYW | | (“HC”) amino acid sequence |
| | | GQGTLVTVSS | | |
| Ab 17 | 34 | DIRLTQSPDSLAVSLGERATINCKSSQSVLYSSNNKNYLAWYQQKPGQPPNLLIYWA | ADI-14349 | Light chain variable region |
| | | STRDSGVPDRFSGSGSGTDFTLTISRLQAEDVAVYYCQQYYSTPYTFGQGTKLEIK | | (“LC”) amino acid sequence |
| Ab 18 | 35 | EVQLVESGPGLVKPSETLSLTCTVSGDSVSNNNYYWNWIRQSPGKGLEWIGYIYYS | ADI-14350 | Heavy chain variable region |
| | | GSTDYNPSLKSRVTISVDTSKNQFSLNLRSVTAADTAIYFCASAPWGMFTILGVVPSY | | (“HC”) amino acid sequence |
| | | YYGMDVWGQGTTVTVSS | | |
| Ab 18 | 36 | QSVLTQPPSVSGAPGQRVTISCTGSSSNIGAGYDVHWYQQLPGTAPKLLIYGSSNR | ADI-14350 | Light chain variable region |
| | | PSGVPDRFSGSRSGTSASLAITGLQAEDEADYYCQSYDGSLGVYVFATGTKVTVL | | (“LC”) amino acid sequence |
| Ab 19 | 37 | EVQLLESGGGLVQPGGSLRLSCSASGFTFSTYWMHWVRQAPGKGLVWVSRINGD | ADI-14351 | Heavy chain variable region |
| | | GNDRNYADSVKGRFTISRDNAKNTVYLQMNSLRAEDTAVYYCARGGATGDFYFG | | (“HC”) amino acid sequence |
| | | MDVWGQGTTVTVSS | | |
| Ab 19 | 38 | SYELTQPPSVSVAPGKTAKITCGGNNIGTKSVHWYQQKPGQAPVLVIYYDTDRPSGI | ADI-14351 | Light chain variable region |
| | | PERFSGSNSGNTATLTISRVEAGDEADYYCQVWDSSNSDHVGVFGGGTQLTVL | | (“LC”) amino acid sequence |
| Ab 20 | 39 | EVQLLETGPGLVKPSQTLSLICAVSGGSISSGGYSWSWIRQPPGKGLEWVGYISYSG | ADI-14352 | Heavy chain variable region |
| | | STYYNPSLKSRVTISVDTSKNQFSLKLNSVTAADTAVYFCARVDGIYSSGMRFDYWG | | (“HC”) amino acid sequence |
| | | QGTLVTVSS | | |
| Ab 20 | 40 | DIQLTQSPGTLSLSPGERATLSCRASQSVSSYYLAWYQQKPGQAPRLLIYGTSSRATG | ADI-14352 | Light chain variable region |
| | | IPDRFSGSGSGTDFTLTISRLEPEDFAVYYCQQYGRSPLFGQGTRLEIK | | (“LC”) amino acid sequence |
| Ab 21 | 41 | QVQLVQSGAEVKKPGSSVKVSCKASGGTFSSYTISWVRQAPGQGLEWMGRIKPIIG | ADI-14353 | Heavy chain variable region |
| | | IANNAQRFKGRVTITAEKSTGTAYMELSSLTSEDTAVYYCARGGYDYYGMDVWGQ | | (“HC”) amino acid sequence |
| | | GTTVTVSS | | |
| Ab 21 | 42 | QSALTQPASVSGSPGQSITISCTGTSSDVGGYNYVSWHQQHPGKAPKLLIYDVSNR | ADI-14353 | Light chain variable region |
| | | PSGVSNRFSGSKSGNTASLSISGLQAEDEADYYCSSFTSTSTPYVFGTGTQLTVL | | (“LC”) amino acid sequence |
| Ab 22 | 43 | QVQLVQSGAEVKKPGSSAKVSCKASGGTFSSYTISWVRQAPGQGLEWMGRIIPFL | ADI-14354 | Heavy chain variable region |
| | | GIANYAQKFQGRVTFTADKSTSTVYMDLSRLRSEDTALYYCAREPMYYGGDSYAFD | | (“HC”) amino acid sequence |
| | | VWGQGTTVTVSS | | |
| Ab 22 | 44 | QSVLTQPASMSGSPGHSITISCTGTSSDVGAYNYVSWYQQHPGKAPKLMIYDVSN | ADI-14354 | Light chain variable region |
| | | RPSGVSSRFSGSKSGNTASLTISGLQPEDEADYYCSSFTTSSTRVEGTGTKLTVL | | (“LC”) amino acid sequence |
| Ab 23 | 45 | EVQLVESGPTLVKPTQTLTLICTFSGFSLSTSGVGVGWIRQPPGKALEWLAVIYWD | ADI-14355 | Heavy chain variable region |
| | | DDKTYSPSLKSRLTITKDTSKNQVVLTMTNMNPVDTATYYCARCPAPVYSYGVDV | | (“HC”) amino acid sequence |
| | | WGQGTTVTVSS | | |
| Ab 23 | 46 | QSALTQPASVSGSPGQSITISCTATSSDFGGYDYVSWYQQHPGEAPKLMISDVTNR | ADI-14355 | Light chain variable region |
| | | PSGVSNRFSGSKSGNTASLTISGLQAEDEADYYCSSYTSYTTPYVFGTGTKLTVL | | (“LC”) amino acid sequence |
| Ab 24 | 47 | QVQLQESGAGLLKPSETLSLTCAVYGGSFSGYYWSWIRQPPGKGLEWIGEINHSGS | ADI-14356 | Heavy chain variable region |
| | | TNYNPSLKSRVTISVDTSKNQFSLKLSSVTAADTAVYYCARDQRIVVVGAATEPYYYY | | (“HC”) amino acid sequence |
| | | YGMDVWGQGTTVTVSS | | |
| Ab 24 | 48 | QPVLTQPPSVSVSPGQTARITCSGDALPKQYAYWYQQKPGQAPVLVIYKDSERPSG | ADI-14356 | Light chain variable region |
| | | IPERFSGSSSGTTVTLTISGVQAEDEADYYCQSADSSGTYRVFGGGTKLTVL | | (“LC”) amino acid sequence |
| Ab 25 | 49 | EVQLVESGGGVVQPGRSLRLSCAASGFTFSNYAMHWVRQAPGKGLEWVSIISYDG | ADI-14357 | Heavy chain variable region |
| | | SNKYYADSVKGRFTISRDNSKNTLYLQINSLRTEDTAVYYCARARKRIPIVVVTAPYYY | | (“HC”) amino acid sequence |
| | | GMDVWGQGTTVTVSS | | |
| Ab 25 | 50 | DIRVTQSPSSLSASVGDRVTITCRASQSISSYLHWYQQQPGKAPNLLIYAASNLQSG | ADI-14357 | Light chain variable region |
| | | VPSRFSGSGSGTDFTLTISSLQPEDFATYYCQQSYTTPHTFGQGTKVEIK | | (“LC”) amino acid sequence |
| Ab 26 | 51 | QVQLVQSGGGLVKPGGSLRLSCVASGFTFSDYYMTWIRQAPGKGLEWVSYISGSS | ADI-14358 | Heavy chain variable region |
| | | AYTIYADSVKGRFTISRDNAKNSLYLQMNGLRAEDTAVYYCARVSWVRSLDSWGQ | | (“HC”) amino acid sequence |
| | | GTLVTVSS | | |
| Ab 26 | 52 | QSALTQPASVSGSPGQSITISCTGSTSDVGLYNYVSWYQLHPGKAPKLIIYDVRHRPS | ADI-14358 | Light chain variable region |
| | | GVSDRFSASKSGNTASLTISGLQAEDEADYYCCSYTSSSTYVFGSGTQLTVL | | (“LC”) amino acid sequence |
| Ab 27 | 53 | QVQLVQSGPALVKPTQTLTLICTFSGFSLSTSGMCVSWIRQPPGKALEWLARIDW | ADI-14359 | Heavy chain variable region |
| | | DDDKYYSTSLKTRLTISKDTSKNQVVLTMTNMDPVDTATYYCARATNYDSSGYYSLY | | (“HC”) amino acid sequence |
| | | FDYWGQGTLVTVSS | | |
| Ab 27 | 54 | DIQMTQSPSSLSASVGDRVTITCRASQSISSYLNWYQQKPGKAPKLLIYAASSLQSG | ADI-14359 | Light chain variable region |
| | | VPSRFSGSGSGTDFTLTISSLQPEDFATYYCQQSYSTPYTFGQGTKVEIK | | (“LC”) amino acid sequence |
| Ab 28 | 55 | QVQLVQSGAEVKKPGASVKVSCKASGYTFTTYSMHWVRQAPGQRLEWMGWIN | ADI-14360 | Heavy chain variable region |
| | | AGNGNTKYSQKFQGRVTITRDTSASTAYMELSSLRSEDTAVYYCARDGVGGAYYYG | | (“HC”) amino acid sequence |
| | | EMDVWGQGTTVTVSS | | |
| Ab 28 | 56 | EIVLTQSPLSLPVTPGEPASISCRSSQSLLHSNGYNYLDWYLQKPGQSPQLLIYLGSNR | ADI-14360 | Light chain variable region |
| | | ASGVPDRFSGSGSGTDFTLKISRVEAEDVGVYYCMQALQTPRFTFGPGTKVEIK | | (“LC”) amino acid sequence |
| Ab 29 | 57 | EVQLLESGGGFVQPGGSLRLSCAASGFTFSSYAVNWVRQAPGKGLEWVSLISGSGR | ADI-14361 | Heavy chain variable region |
| | | TDYTDSVKGRFTISRDNAKNTLFLQMNSLRVEDTAVYYCAKSWGSSGYGYLDYWG | | (“HC”) amino acid sequence |
| | | QGTLVTVSS | | |
| Ab 29 | 58 | QSGLTQPPSVSGAPGQRVTISCTGSSSNIGPGTDVHWYQHFPGTAPKLLIFGNSNR | ADI-14361 | Light chain variable region |
| | | PSGVPDRFSGSKSGTSASLAITGLQAEDEAYYYCQSYDRILSASVFGGGTKLTVL | | (“LC”) amino acid sequence |
| Ab 30 | 59 | EVQLLESGGGLVQPGGSLRLSCAASGFTFSSYAMSWVRQAPGKGLEWVSGISGSG | ADI-14362 | Heavy chain variable region |
| | | GSTYYADSVKGRFTISRDNSKNTLYLEMNSLRAEDTAVYYCAKRYYYGSGTYTFDIW | | (“HC”) amino acid sequence |
| | | GQGTMVTVSS | | |
| Ab 30 | 60 | DIRLTQSPSSLSASVGDRVTITCRASQSIISYLNWYQQKPGKAPKLLIYAASSLQSGVP | ADI-14362 | Light chain variable region |
| | | SRFSGSGSGTDFTLTISSLQPEDFATYYCQQSYSTPYTFGQGTKVEIK | | (“LC”) amino acid sequence |
| Ab 31 | 61 | QVQLVESGGGLVKPGGSLRLSCAASGFTFSDYYMSWIRQAPGKGLEWVSYISGGG | ADI-14363 | Heavy chain variable region |
| | | TYTKYADSVKGRFTISRDNAKNSVYLQMNSLRAEDTAVYYCARDVALVGWELRYG | | (“HC”) amino acid sequence |
| | | MDVWGQGTTVTVSS | | |
| Ab 31 | 62 | ETTLTQSPGTLSLSPGERATLSCRARENVNSSYLAWYQQKPGQAPRLLIYGASSRAT | ADI-14363 | Light chain variable region |
| | | GIPDRFSGSGSGTDFTLTISRLEPEDFAVYYCQQYAISPWTFGQGTKVEIK | | (“LC”) amino acid sequence |
| Ab 32 | 63 | QVQLVQSGAEVKKPGESLKISCKGSGYSFTSHWIGWVRQMPGKGLEWMGITDPG | ADI-14364 | Heavy chain variable region |
| | | DSDTRYSPSFQGQVTISADKSISTAYLQWSSLKASDTAMYYCAREPRRWMTTETNG | | (“HC”) amino acid sequence |
| | | PYYFDNWGQGTLVTVSS | | |
| Ab 32 | 64 | SYVLTQPPSVSVAPGKTARITCGGNNIGSKSVHWYQQKPGQAPVLVIYYDSDRPSGI | ADI-14364 | Light chain variable region |
| | | PERFSGSNSGNTATLTISRVEAGDEADYYCQVWDSSSDNRVFGGGTKVTVL | | (“LC”) amino acid sequence |
| Ab 33 | 65 | QVQLVQSGAEVKKPGASVKVSCKVSGYTLTKLSMHWVRQAPGKGLEWMGFFDP | ADI-14365 | Heavy chain variable region |
| | | EDGDTLYAQKFQGRVTMTEDTSSDTPYMELRSLRSEDTAVYYCASPAAAGQFDYW | | (“HC”) amino acid sequence |
| | | GQGTLVTVSS | | |
| Ab 33 | 66 | DIVMTQSPSSLSASVGDRVTITCRASQFISSYLHWYQQKTGKAPKLLIYAASSLQSGV | ADI-14365 | Light chain variable region |
| | | PSRFSGSGSGTDFTLTISSLQPEDFATYYCQQSYNTPRTFGQGTKLEIK | | (“LC”) amino acid sequence |
| Ab 34 | 67 | QVQLVQSGTEVKKPGASVKVSCKASGYTFNMYGVSWVRQAPGQGLEWMGWIS | ADI-14366 | Heavy chain variable region |
| | | AYNGNTNYAQKFQGRVTMTIDTSTTTAYMELRSLRSDDTAMYYCARDFQAEEPLS | | (“HC”) amino acid sequence |
| | | NWFDPWGQGTLVTVSS | | |
| Ab 34 | 68 | DIVMTQTPSSLSASVGDRVIITCRASQSISRYINWYQKKPGKAPKFLIYAVSSLGSGVP | ADI-14366 | Light chain variable region |
| | | SRFSGSGSGTDFTLTISSLQPEDFATYYCQQSYSTPFTFGPGTKVDIK | | (“LC”) amino acid sequence |
| Ab 35 | 69 | EVQLLESGGGLVQPGGSLRLSCAASGFTFGSYDMNWVRQAPGKGLEWVSGISGS | ADI-14367 | Heavy chain variable region |
| | | GDATYYADSVKGRFTISRDNSKNMLYLQMNSLSAEDMAVYYCARDRAFTMKYNS | | (“HC”) amino acid sequence |
| | | NWYKIYWGQGTMVTVSS | | |
| Ab 35 | 70 | EIVLTQSPGTLSLSPGERATLSCRASQSVTSSYLAWYQQKPGQAPRLLIYGAFSRATG | ADI-14367 | Light chain variable region |
| | | IPDRFSGSGSGTDFTLTISRLEPEDFAVYYCHHYGTSRWTFGQGTKVDIK | | (“LC”) amino acid sequence |
| Ab 36 | 71 | EVQLVESGGGLVKPGGSLRLSCAASGFTFINAWMSWVRQAPGKGLEWVGRIKSK | ADI-14368 | Heavy chain variable region |
| | | ADGGTTDDAAPVKGRFTISRDDSKNTLYLQMNSLKIEDTAVYYCATDVLPLYNWNL | | (“HC”) amino acid sequence |
| | | GWNFDLWGRGTLVTVSS | | |
| Ab 36 | 72 | SYVLTQPPSVSVAPGKTARITCGGNNIADKSVHWYQQKPGQAPVLVMYYDTDRPS | ADI-14368 | Light chain variable region |
| | | GIPERFSGFNSGNTATLTISRVEAGDEADYYCQVWDSSSDHVVFGGGTKVTVL | | (“LC”) amino acid sequence |
| Ab 37 | 73 | QVQLVQSGAEVKKPGSSVKVSCKASGGTFSSNAISWVRQAPGQGLEWMGGIIPIF | ADI-14369 | Heavy chain variable region |
| | | ATANYAQNFQDRVTITADESTGTAYMELSSLRYEDTAVYYCAKSAIHSGYHGPARS | | (“HC”) amino acid sequence |
| | | GFYQNGMDVWGQGTTVTVSS | | |
| Ab 37 | 74 | SYELTQPPSASGTPGQRVTISCSGSSSNIGINPVNWYQHFPGTAPKLLIYRNNQRPS | ADI-14369 | Light chain variable region |
| | | GVPDRFSGSKSGTSASLAISGLQSEDEAVYYCAAWDDRLNGPVFGGGTQLTVL | | (“LC”) amino acid sequence |
| Ab 38 | 75 | EVQLVESGGGVVQPGKSLRLSCAASGFSFSTFAMHWVRQAPGKGLEWVAVISYD | ADI-14370 | Heavy chain variable region |
| | | GSNKFYADSVKGRFTISRDSSKNTLYLQMNSLRAEDTAVYYCARGGYSSGWYVTHF | | (“HC”) amino acid sequence |
| | | DYWGQGTLVTVSS | | |
| Ab 38 | 76 | QSVLTQPPSASGSPGQSVTISCTGTSSDVGGYNYVSWYQQHPGKAPKLMIYEVSKR | ADI-14370 | Light chain variable region |
| | | PSGVPDRFSGSKSGNTASLIVSGLQAEDEADYYCSSYAGSNNLYVEGTGTKLTVL | | (“LC”) amino acid sequence |
| Ab 39 | 77 | EVQLVESGGGLVQPGGSLRLSCAASGFTFSNYAMTWVRQAPGKGLEWLSSISGSG | ADI-14371 | Heavy chain variable region |
| | | GSTYYADSVKGRFTISRDNSRNTLYVQMNSLRVEDTAFYYCAKAFYEYGAGSPGDY | | (“HC”) amino acid sequence |
| | | WGQGTLVTVSS | | |
| Ab 39 | 78 | DIQLTQSPSSLSASVGDRVTITCRASQSIGTNLNWYQQKPGKAPKFLIYAASSLQRG | ADI-14371 | Light chain variable region |
| | | VPSRFSGSGSGSEFTLTISSLQPEDFATYYCQQSYSTLPITFGQGTKLEIK | | (“LC”) amino acid sequence |
| Ab 40 | 79 | QVQLLESGGGLVQPGGSLRLSCAASGFTFSNYAMGWVRQAPGQGLEWVSRISAT | ADI-14372 | Heavy chain variable region |
| | | GGSTHYADSVRGRFTISRDNSKNTLYLQMNSLKAEDTAVYYCAKDRGYSRNLTPDY | | (“HC”) amino acid sequence |
| | | WGQGTLVTVSS | | |
| Ab 40 | 80 | ETTLTQSPSSLSASVGDRVTITCRASQGITNDLGWYQKKPGKAPKLLIYVASSLQSGV | ADI-14372 | Light chain variable region |
| | | PSRFSGSGSGTDFTLTISSLQPEDFATYYCLQDYNYPITFGQGTKVDIK | | (“LC”) amino acid sequence |
| Ab 41 | 81 | QVQLQQWGAGLLKPSETLSLTCAVYGGSFSGSYWSWIRQPPGKGLEWIGEINHSG | ADI-14373 | Heavy chain variable region |
| | | STSYNPSLKSRVTISVDTSKKQFSLKLSSMTAADTAVYYCAGGFYYDSSGSYAPHPTF | | (“HC”) amino acid sequence |
| | | DYWGQGTLVTVSS | | |
| Ab 41 | 82 | DIVMTQTPATLSVSPGERATLSCRASQSVSSNLAWYQQKPGQAPRLLIYGASTRAT | ADI-14373 | Light chain variable region |
| | | GIPARFSGSGSGTEFTLTISSLQSEDFAVYYCQQYNNWPRTFGQGTKVEIK | | (“LC”) amino acid sequence |
| Ab 42 | 83 | QVQLVQSGGVVVQPGGSLRLSCAASGFNFDDFTMHWVRQAPGKGLEWVSLITW | ADI-14374 | Heavy chain variable region |
| | | DGGITYYADSVKGRFTISRDNGKNSLYLRMNSLRTEDTALYYCAKDGDRYSGYAFLD | | (“HC”) amino acid sequence |
| | | YWGQGTLVTVSS | | |
| Ab 42 | 84 | SYELTQPPSVSVAPGKTARLTCGGNNIGSESVHWYQQRPGQAPVLVSYYNGDRPS | ADI-14374 | Light chain variable region |
| | | GIAERISASKSGNTATLTIYRVEAGDEADYYCQVWHSSSDHFVFGTGTQLTVL | | (“LC”) amino acid sequence |
| Ab 43 | 85 | EVQLVESGGGLVQPGGSLRLSCAVSGFTFSNYAVSWVRQAPGKGLEWVSGISGSG | ADI-14375 | Heavy chain variable region |
| | | GTTYYVDSVKGRFTVSRDNSKNTLFLQLNSLKAEDTAVYYCAKDWGYSGGRPYFDY | | (“HC”) amino acid sequence |
| | | WGQGTLVTVSS | | |
| Ab 43 | 86 | QSVLTQPPSVSGAPGQRVTISCTASSSNIGPIYDVHWYQQLPGTGPKLLIYGNNNRP | ADI-14375 | Light chain variable region |
| | | SGVPDRFSGSKSGTSASLAITGLQAEDEADYYCQSYDTSLSVVFGGGTKLTVL | | (“LC”) amino acid sequence |
| Ab 44 | 87 | EVQLVESGGGLVQPGGSLRLSCAASGFTFSSYWMHWVRQAPGKGPVWVSRINSD | ADI-14376 | Heavy chain variable region |
| | | GSTTNYADYMKGRFTISRDNAKNTVYLQMNSLRAEDTAVYYCARDSDSYDDAFDI | | (“HC”) amino acid sequence |
| | | WGQGTTVTVSS | | |
| Ab 44 | 88 | SYELTQPPSVSVSPGQTARISCSGEALPKKYSYWYQQKSGQAPVLVIYEDSKRPSGIP | ADI-14376 | Light chain variable region |
| | | ERFSGSSSGTMATLTISGAQVEDEADYYCYSTDSSGNHRVFGGGTKVTVL | | (“LC”) amino acid sequence |
| Ab 45 | 89 | EVQLVESGGGVVQPGGSLRLSCAVSGITFSSYGMHWVRQAPGKGLEWVAFIRYD | ADI-14377 | Heavy chain variable region |
| | | GSNKYYGDSLRGRFTISRDNSKNTLYLQMNSLRAEDTAVYYCAKDAVGIGGYYGLD | | (“HC”) amino acid sequence |
| | | VWGQGTTVTVSS | | |
| Ab 45 | 90 | DIQMTQSPSSLSASVGDRVTITCRASQGIRNDLGWYQQKPGKAPKRLIYAASSLQS | ADI-14377 | Light chain variable region |
| | | GVPSRFSGSGSGTEFTLTISSLQPEDFATYYCLQHNGYPWTFGQGTKVEIK | | (“LC”) amino acid sequence |
| Ab 46 | 91 | QVQLVESGGGLVQPGGSLRLSCAASGFTFSSYWMHWVRQAPGKGLVWVSRINS | ADI-14378 | Heavy chain variable region |
| | | DGSSPTYADSVKGRFTISRDNAKNTVFLQMNSLRAEDTAVYYCARESWELIRGDAF | | (“HC”) amino acid sequence |
| | | DIWGQGTTVTVSS | | |
| Ab 46 | 92 | DIQMTQSPSSLSASVGDRVTITCRASQSISSSLNWYQQKPGKAPNLLIYAASTLQSG | ADI-14378 | Light chain variable region |
| | | VPSRFSGSGSGTDFTLTISSLQPEDFATYYCQQSYRTPRTFGQGTKVEIK | | (“LC”) amino acid sequence |
| Ab 47 | 93 | EVQLLESGGGVVQPGRSLRLSCAASGFTFSSYAMHWVRQAPGKGLEWVAVIGND | ADI-14379 | Heavy chain variable region |
| | | GTNKYHADSVKGRFTISRDNSKNTLYLQMNSLRAEDTAVYYCARRRVGIMYSGSY | | (“HC”) amino acid sequence |
| | | WGGMDVWGQGTTVTVSS | | |
| Ab 47 | 94 | SYELTQPPSVSVSPGQTASITCSGDKLGGKYVSWYQQKPGQSPVLVMYQDTRRPS | ADI-14379 | Light chain variable region |
| | | GIPERLSGSNSGSTATLTISATQAMDEADYYCQAWDITTVHVVFGGGTKLTVL | | (“LC”) amino acid sequence |
| Ab 48 | 95 | QVQLVQSGAEVKKPGESLKISCKGSGYTFTSYWIGWVRQLPGKGLEWMGVIFPGD | ADI-14380 | Heavy chain variable region |
| | | SDTRYSPSFQGQVTISADKSISTAYLQWSSLKAADTAMYYCARTRLGRGFYRFDSW | | (“HC”) amino acid sequence |
| | | GQGTLVTVSS | | |
| Ab 48 | 96 | QSVLTQPPSVSAAPGQKVTISCSGSSSNIGNNYVSWYQQLPGTAPRLLIYENNERPS | ADI-14380 | Light chain variable region |
| | | GIPDRFSGSKSGTSATLGITGLQTGDEADYYCATWDSGLSAGYVFGTGTKLTVL | | (“LC”) amino acid sequence |
| Ab 49 | 97 | EVQLVESGGGLVQPGGSLRLSCAASGFTFSSYSMNWVRQAPGKGLEWVSYIGSSS | ADI-14381 | Heavy chain variable region |
| | | SSVYYGDSAKGRFTISRDNAKNSLYLQMNSLRDEDTALYYCARVGWLQYCRGGSCY | | (“HC”) amino acid sequence |
| | | ASFGMDVWGQGTTVTVSS | | |
| Ab 49 | 98 | DIQMTQSPSSLSASVGDRVTITCRASQGIRNDLGWYQQKPGIAPKLLIYAASSLQSG | ADI-14381 | Light chain variable region |
| | | VPSRFSGSGSGTDFTLTISSLQPEDFATYYCLQDYDSPYTFGQGTKLEIK | | (“LC”) amino acid sequence |
| Ab 50 | 99 | EVQLLESGGGVVQPGRSLRLSCAASGFTFSAYGFHWVRQAPGKGLEWVAVIWFD | ADI-14382 | Heavy chain variable region |
| | | GNNKYYADSMKGRFIISRDNSKNTLYLQMNSLRAEDTAVYYCARDPKETGEFDYW | | (“HC”) amino acid sequence |
| | | GQGTLVTVSS | | |
| Ab 50 | 100 | QSALTQPASVSGSPGQSITISCTGTISDVGRYNYVSWYQQHPGKAPKLMIYDVTNR | ADI-14382 | Light chain variable region |
| | | PSGVSNRFSGSKSGNTASLTISGLQAEDEAVYYCCSYTISSTYVFGTGTKLTVL | | (“LC”) amino acid sequence |
| Ab 51 | 101 | QITLKESGPTLVKPTQTLTLTCTFSGFSLSTSGVGVGWIRQPPGKALEWLALIYWDE | ADI-14383 | Heavy chain variable region |
| | | DKRYSPSLKTRLTITKDTSRNQVKLTMTNMDPVDTATYYCAHQYYDILTGYPSPGAF | | (“HC”) amino acid sequence |
| | | DIWGQGTTVTVSS | | |
| Ab 51 | 102 | QPVLTQPASVSGSPGQSITISCTGTSSDVVSYNLVSWFQQHPGKAPKLMIYEVTRRP | ADI-14383 | Light chain variable region |
| | | SGVSNRFSGSKSGNTASLTISGLQAEDEADYYCCAYTGTPVVFGGGTKLTVL | | (“LC”) amino acid sequence |
| Ab 52 | 103 | QVQLQESGSGLVKPSQTLSLTCTVSGGSISSVGYSWSWIRQPPGKGLEWIGYIYHSG | ADI-14384 | Heavy chain variable region |
| | | SPYYSPSLNSRVTISVDRSKNQFSLKLSSVTAADTAVYFCARVFFGGGGAFDIWGQG | | (“HC”) amino acid sequence |
| | | TTVTVSS | | |
| Ab 52 | 104 | QPGLTQPPSVSVAPGQTARITCGGNNIGSKSVQWYQQKPGQAPVLVMYYDSDRP | ADI-14384 | Light chain variable region |
| | | SGIPDRFSGSSSGNTATLTITRVEAGDEADYSCQVWDSVNVHPVIFGGGTKLTVL | | (“LC”) amino acid sequence |
| Ab 53 | 105 | QVQLVQSGAEVKKPGESLKISCKGSGYSFTSYWIGWVRQMPGKGLEWMGIIYPGD | ADI-14385 | Heavy chain variable region |
| | | SDTRYSPSFQGQVTISADKSISTAYLQWSSLKASDTAMYYCASSSYSNYFDYWGQG | | (“HC”) amino acid sequence |
| | | TLVTVSS | | |
| Ab 53 | 106 | NFMLTQPHSVSESPGKTVTISCTRSSGSIASNYVQWYQQRPGSAPTTVIYEDNQRP | ADI-14385 | Light chain variable region |
| | | SGVPDRFSGSIDSSSNSASLTISGLKTEDEADYYCQSYDSSNPWVFGGGTKLTVL | | (“LC”) amino acid sequence |
| Ab 54 | 107 | EVQLVESGGGLVQPGGSLRLSCAASRFTFSSYAMSWVRQAPGKGLEWVSGIGASG | ADI-14386 | Heavy chain variable region |
| | | GTTYYADSVKGRFTISRDNSKNTVYLQMNSLRAEDTAVYYCARCEYYYGSGSAGYYF | | (“HC”) amino acid sequence |
| | | DYWGQGTLVTVSS | | |
| Ab 54 | 108 | SYELTQPPSVSVSPGQTASITCSGDKLGSKFAFWYQQKPGQSPVLVIFQDVKRPSGI | ADI-14386 | Light chain variable region |
| | | PERFSGSNSGNTATLTISGTQAMDEADYYCQAWDSGTAVFGGGTKVTVL | | (“LC”) amino acid sequence |
| Ab 55 | 109 | EVQLVESGGGVVQPGRSLRLSCAASGFTFSSYPMHWVRQAPGKGLEWVAVISYD | ADI-14388 | Heavy chain variable region |
| | | GSNKYYADSVKGRFTISRDNSKNTLYLQMNSLRAEDTAVYSCARAQSAAIFDHWG | | (“HC”) amino acid sequence |
| | | QGTLVTVSS | | |
| Ab 55 | 110 | QAVVTQEPSLTVSPGGTVTLTCASSTGAVTSGYYPNWFQQKPGQAPRALIYTTSKR | ADI-14388 | Light chain variable region |
| | | HSWTPARFSGSLLGGKAALTLSGVQPEDEADYYCLLYYGGANWVFGGGTKLTVL | | (“LC”) amino acid sequence |
| Ab 56 | 111 | EVQLVESGGGLVKPGGSLRLSCAASGFTFINAWMAWVRQAPGKGPEWVGRIKSR | ADI-14389 | Heavy chain variable region |
| | | ADGGTTDYAAPVKGRFTISRDDSKNRLFLQMDSLKTDDTAVYFCTTGVRALRFYNG | | (“HC”) amino acid sequence |
| | | MDVWGQGTTVTVSS | | |
| Ab 56 | 112 | ETTLTQSPSSLSASIGDRVTITCRAGQSISSFLNWYQQKPGKAPKLLIYAASTLQSGVP | ADI-14389 | Light chain variable region |
| | | SRFSGSKSGTDFTLTISSLQPEDFATYYCQQSYHTFTFGPGTKVEIK | | (“LC”) amino acid sequence |
| Ab 57 | 113 | QVQLVESGPGLVKPSETLSLTCAVSGYSISSGYYWGWIRQPPGKGLEWIGNIYHSGS | ADI-14390 | Heavy chain variable region |
| | | TYYNPSLKSRVTISVDTSKNQFSLKLSSVTAADTAVYYCARATLRFTLVREVVVTACD | | (“HC”) amino acid sequence |
| | | AFDIWGQGTTVTVSS | | |
| Ab 57 | 114 | QSALTQPASVSGSPGQSITISCTGTSSDVGSYNLVSWYQQHPGKVPKLVIYEVNKRP | ADI-14390 | Light chain variable region |
| | | SGVSNRFSGSKSGNTASLTISGLQAEDEADYYCCSYAGSSTFVVEGGGTKLTVL | | (“LC”) amino acid sequence |
| Ab 58 | 115 | QVQLVESGGGLVQPGGSLRLSCAAAGFSFSNYAMSWVRQAPGKGLEWVAVISGN | ADI-14391 | Heavy chain variable region |
| | | AGSTYYAESVKGRFTISRDNSKNTLHLQMNSLRGEDTAVYYCAKPPGIAVAGEYYW | | (“HC”) amino acid sequence |
| | | YFDLWGRGTLVTVSS | | |
| Ab 58 | 116 | QVQLMQPPSVSVSPGQTARITCSGDALPRENAYWYQQKSGQAPVLVIYEDSKRPS | ADI-14391 | Light chain variable region |
| | | GIPERFSGSSSGTMATLTITGAQVEDEADYYCYSTDTSAYHWVFGGGTKLTVL | | (“LC”) amino acid sequence |
| Ab 59 | 117 | EVQLLESGAEVKKPGSSVKVSCKASGGTFSSYGISWVRQAPGQGLEWMGGIIPIFG | ADI-14392 | Heavy chain variable region |
| | | TSNYAQKFQGRVTITADESTSTAYMELSSLRSEDTAVYYCALDSSGRARYYAMDVW | | (“HC”) amino acid sequence |
| | | GQGTTVTVSS | | |
| Ab 59 | 118 | DIQVTQSPATLSLSPGERATLSCRASQSVSSYLAWYQQKPGQAPRLLIYDASNRATG | ADI-14392 | Light chain variable region |
| | | IPARFSGSGSGTDFTLTISSLEPEDFAVYYCQQRNNWPPTFGPGTKVEIK | | (“LC”) amino acid sequence |
| Ab 60 | 119 | QVQLVESGGGLVKPGGSLRLSCAASGFSFTGFYMNWVRQAPGKGLEWVSSISSSS | ADI-14393 | Heavy chain variable region |
| | | TYKNYADSLQGRFTISRDNARSSLYLQMNSLRAEDTAVYYCARTRTEYTYGYYHDF | | (“HC”) amino acid sequence |
| | | WGQGTLVTVSS | | |
| Ab 60 | 120 | QPVLTQPPSVSGAPGQRVTISCTGSSSNIGAGYDVHWYQQVPGTAPKLLIYNNNN | ADI-14393 | Light chain variable region |
| | | RPSGVPDRFSGSKSGTSASLAITGLQAEDEADYYCQSYDSRLSGVFGGGTKLTVL | | (“LC”) amino acid sequence |
| Ab 61 | 121 | EVQLLESGGGLVKPGGSLRLSCAASGFTFSSYSMNWVRQAPGKGLEWVSSISSSSS | ADI-14394 | Heavy chain variable region |
| | | YIYYADSVKGRFTISRDNAKNSLYLQMNSLRAEDTAVYYCARGSEYYFDYWGQGTL | | (“HC”) amino acid sequence |
| | | VTVSS | | |
| Ab 61 | 122 | QSVLTQPPSVSGAPGQRVTISCTGSSSNIGAGYDVHWYQQLPGTAPKLLIYGNSNR | ADI-14394 | Light chain variable region |
| | | PSGVPDRFSGSKSGTSASLAITGLQAEDEADYYCQSYDSSLSVVEGGGTKVTVL | | (“LC”) amino acid sequence |
| Ab 62 | 123 | EVQLVESGGGVVQPGRSLRLSCAASGFTFSSYAMHWVRQAPGKGLEWVAVISYD | ADI-14395 | Heavy chain variable region |
| | | GSNKYYADSVKGRFTISRDNSKNTLYLQMNSLRAEDTAVYYCARDDTYYYDSSGYS | | (“HC”) amino acid sequence |
| | | APFDYWGQGTLVTVSS | | |
| Ab 62 | 124 | DIQVTQSPSTLSASVGDRVTITCRASQSISSWLAWYQQKPGKAPKLLIYKASSLESGV | ADI-14395 | Light chain variable region |
| | | PSRFSGSGSGTEFTLTISSLQPDDFATYYCQQYNSYPWTFGQGTKVEIK | | (“LC”) amino acid sequence |
| Ab 63 | 125 | EVQLVESGGGVVQPGRSLRLSCAASGFTFSSYAMHWVRQAPGKGLEWVAVISYD | ADI-14396 | Heavy chain variable region |
| | | GSNKYYADSVKGRFTISRDNSKNTLYLQMNSLRAEDTAVYYCARELRYFDWEYGG | | (“HC”) amino acid sequence |
| | | MDVWGQGTTVTVSS | | |
| Ab 63 | 126 | EIVLTQSPSSLSASVGDRVTITCQASQDISNYLNWYQQKPGKAPKLLIYDASNLETGV | ADI-14396 | Light chain variable region |
| | | PSRFSGSGSGTDFTFTISSLQPEDIATYYCQQYDNLPMYTFGQGTKLEIK | | (“LC”) amino acid sequence |
| Ab 64 | 127 | EVQLVESGGGVVQPGRSLRLSCAASGFTFSSYAMHWVRQAPGKGLEWVAVISYD | ADI-14397 | Heavy chain variable region |
| | | GSNKYYADSVKGRFTISRDNSKNTLYLQMNSLRAEDTAVYYCARDDTYYYDSNGYS | | (“HC”) amino acid sequence |
| | | APFDYWGQGTLVTVSS | | |
| Ab 64 | 128 | DIQVTQSPSTLSASVGDRVTITCRASQSISSWLAWYQQKPGKAPKLLIYKASSLESGV | ADI-14397 | Light chain variable region |
| | | PSRFSGSGSGTEFTLTISSLQPDDFATYYCQQYNSYPWTFGQGTKVDIK | | (“LC”) amino acid sequence |
| Ab 65 | 129 | EVQLLESGPGLVKPSQTLSLTCAVSGGSINSGRYSWSWIRQPPGKGLEWIGYIYYSG | ADI-14399 | Heavy chain variable region |
| | | TTYYNPSLESRVTISRDTSKNQFSLNLSSVTAADTAVYYCARTNSADSYASGSHYIRP | | (“HC”) amino acid sequence |
| | | QYFDFWGQGTLVTVSS | | |
| Ab 65 | 130 | DIQLTQSPATLSLSPGERATLSCRASQSVSSYLAWYQQKPGQAPRLLIYGASNRATGI | ADI-14399 | Light chain variable region |
| | | PARFSGSGSGTDFTLTISRLEPEDFAVYYCQQRSNWLTFGGGTKVEIK | | (“LC”) amino acid sequence |
| Ab 66 | 131 | QVQLVQSGGGVVQPGRSLRLSSAASGFTFSSYAMHWVRQAPGKGLEWVAVISHD | ADI-14400 | Heavy chain variable region |
| | | GSKYYADSVKGRFTISRDNSKSTLNLQMNSLRPEDTAVYYCARGGDVRLYDDSNGY | | (“HC”) amino acid sequence |
| | | HYDTYYFDYWGQGTLVTVSS | | |
| Ab 66 | 132 | EIVLTQSPSSLSASVGDRVTITCRASQGIRNDLGWYQQKPGKAPKLLIYAASTLQSGV | ADI-14400 | Light chain variable region |
| | | PSRFSGSGSGTDFTLTISSLQPEDFATYYCLQDYNYPLTFGGGTKVEIK | | (“LC”) amino acid sequence |
| Ab 67 | 133 | QVQLVQSGGGLVKPGGSLRLSCAASGFTFSSYSMHWVRQAPGKGLEWVSSISASS | ADI-14401 | Heavy chain variable region |
| | | SYLNYADSVKGRFTISRDNAKKSLYLQLNTLRADDTAVYYCAREDHDSGTYYLNWF | | (“HC”) amino acid sequence |
| | | DPWGQGTLVTVSS | | |
| Ab 67 | 134 | QSVVTQPPSVSGAPGQRVTISCTGSSSNIGAGYDVHWYQQFPGTGPKLLIYGNSHR | ADI-14401 | Light chain variable region |
| | | PSGVPDRFSGSKSGPSASLAITGLQAEDEADYYCQSYDSSLSGYVFGTGTKVTVL | | (“LC”) amino acid sequence |
| Ab 68 | 135 | QVQLVQSGAEVKKPGASVKVSCKTSGYTFTNYGISWVRQAPGQGLEWMGWISAY | ADI-14402 | Heavy chain variable region |
| | | NGNRNYAQKLQGRVTMTTDTSTSTAYMELRSLRSDDTAVYYCAREPPVIAAGDFS | | (“HC”) amino acid sequence |
| | | HWGQGTLVTVSS | | |
| Ab 68 | 136 | EIVLTQSPLSLPVTLGQPASISCRSSQSLVHSDANTYLSWFQQRPGQSPRRLIYKVSN | ADI-14402 | Light chain variable region |
| | | RDSGVPDRFSGSGSGTDFTLKISRVEAEDVGVYYCMQGTHWPPDFGQGTRLEIK | | (“LC”) amino acid sequence |
| Ab 69 | 137 | QVQLVESGGGLGKPGGSLRLSCAASGFTFSGYYMSWIRQAPGKGLEWVSDISSGSS | ADI-14403 | Heavy chain variable region |
| | | FTNYADSVKGRFTISRDNAKNSLYLQMNSLKAEDTAVYYCARVPPDSYGSGSYSGD | | (“HC”) amino acid sequence |
| | | SWGQGTLVTVSS | | |
| Ab 69 | 138 | QSVVTQPPSVSGAPGQRVTISCTGSSSNIGAGYGVHWYQQLPGTAPKLLIYGNTNR | ADI-14403 | Light chain variable region |
| | | PSGVPDRISGSKSGTSASLVITGLQAEDEADYYCQSYDSSLSGWVFGGGTKLTVL | | (“LC”) amino acid sequence |
| Ab 70 | 139 | EVQLVESGGGLVQPGGSLRLSCAASGFTFSNFEMNWVRQAPGKGLEWVSYISSSG | ADI-14404 | Heavy chain variable region |
| | | RIIYYADSVKGRFTISRDNARNSLYVQMNSLRVEDTAVYYCARAKAAAGHDLWGQ | | (“HC”) amino acid sequence |
| | | GTLVTVSS | | |
| Ab 70 | 140 | EIVLTQSPSTLSASVGDRVTITCRASQSISPWLAWYQQKPGKAPKLLIYRASSLESGV | ADI-14404 | Light chain variable region |
| | | PSRFSGSGSGTEFTLTISSLQPDDFATYYCQHYNSYLYTFGQGTKVEIK | | (“LC”) amino acid sequence |
| Ab 71 | 141 | QVQLVQSGTEVKKPGASVKVSCKASGYTFTNYDISWVRQAPGQGLEWMGWISGS | ADI-14405 | Heavy chain variable region |
| | | TGNTIYAQNLQGRLTMTTDTSTSTAYMELRSLRSDDTAIYYCARDNVGYASGNYFD | | (“HC”) amino acid sequence |
| | | YWGQGTLVTVSS | | |
| Ab 71 | 142 | SYVLTQPPSVSVAPGKTARIPCGGNNIGSKSVHWYQQRPGQAPVLVIYYDSVRPSG | ADI-14405 | Light chain variable region |
| | | IPERFSGSNSGNTATLTISTVEAGDEADFYCQVWDSSRDHEVFGGGTKLTVL | | (“LC”) amino acid sequence |
| Ab 72 | 143 | QVQLVQSGAEVKKPGESLKISCKGSGYKFTNYWIAWVRQMPGKGLEWLGVIYPGA | ADI-14406 | Heavy chain variable region |
| | | SDITYSPSFQGQVTISADKSISTAYLQWSSLKASDTAIYYCARQGSITAMSYWGQGT | | (“HC”) amino acid sequence |
| | | MVTVSS | | |
| Ab 72 | 144 | DIVMTQSPLSLPVTPGEPASISCRSSQSLLHSNGFNYLDWYLQKPGQSPQLLIYLGSN | ADI-14406 | Light chain variable region |
| | | RASGVPDRFSGSGSGTDFTLKISRVEAEDVGVYYCMQALQTPFTFGPGTKVEIK | | (“LC”) amino acid sequence |
| Ab 73 | 145 | QVQLVQSGGGVVQPGRSLRLSCAASGFTFSSYGMHWVRQAPGKGLEWVAVIWF | ADI-14407 | Heavy chain variable region |
| | | DGNNKEYADSVKGRFAISRDNSKNTLYLQMNSLRAEDTAVYYCARDLIPVTIFGVV | | (“HC”) amino acid sequence |
| | | NPYSYYGMDVWGQGTTVTVSS | | |
| Ab 73 | 146 | EIVMTQSPSSLSASVGDRVTITCRASQSISTYLNWYQQKPGTAPKLLIYAASSLESGV | ADI-14407 | Light chain variable region |
| | | PSRLSGSGSGTEFILTISSLQREDFATYYCQQSYSTPPTFGQGTKVEIK | | (“LC”) amino acid sequence |
| Ab 74 | 147 | QVQLVQSGPALVKITQTLTLICTFSGFSLITSGMCVSWIRQPPGKALEWLARIDW | ADI-14408 | Heavy chain variable region |
| | | DDDKYYSTSLKTRLTISKDTSKNQVVLTLTNVDPVDTATYYCARMQKYDSSGYYLHY | | (“HC”) amino acid sequence |
| | | FDSWGQGTLVTVSS | | |
| Ab 74 | 148 | DIRLTQSPSSLSASVGDRVTIACRASQSISSYLNWYQQKPGKSPKVLIYAASILQTGVP | ADI-14408 | Light chain variable region |
| | | SRFSGSGSGTDFTLTISSLQPEDFATYYCQQSYSINQYTFGQGTKVEIK | | (“LC”) amino acid sequence |
| Ab 75 | 149 | QVQLVQSGGEVKKPGASVKVSCKASGYTFTYYGISWVRQAPGQGLEWMGWISAY | ADI-14409 | Heavy chain variable region |
| | | NGNTNYEQKFQGRVTMTTDTSTGTAYMELRSLTSDDTAVYYCARDRIVVVTAANY | | (“HC”) amino acid sequence |
| | | YGLDVWGQGTTVTVSS | | |
| Ab 75 | 150 | DIQLTQSPDSLAVSLGERATINCKSSQSVLYRPNNKNFLAWYQQKPGQPPKLLIYW | ADI-14409 | Light chain variable region |
| | | ASTRQSGVPDRFSGSGSGTDFTLTISSLQAEDVAVYYCQQYHTTPLTFGGGTKVDIK | | (“LC”) amino acid sequence |
| Ab 76 | 151 | QVQLQQWGAGLLKPSETLSLICAIYSGSFSGYYWSWIRQPPGKGLEWIGQINYSGS | ADI-14410 | Heavy chain variable region |
| | | AYYTPSLKSRVTISVDTSKNQFSLKLSSVTAADTAVYYCARVRITMVQGAIVPCAIDV | | (“HC”) amino acid sequence |
| | | WGQGTTVTVSS | | |
| Ab 76 | 152 | SYELTQPPSASGTPGQRVTISCSGSSSNIESNFVYWYQQLPGTAPKLLIHRNDQRPS | ADI-14410 | Light chain variable region |
| | | GVPDRFSGSKSGTSASLAISGLRSEDEADYSCAAWDDSLSGVVFGGGTKVTVL | | (“LC”) amino acid sequence |
| Ab 77 | 153 | QVQLVQSGAEVKKPGASVKLSCKASGYTFTRFYIHWVRQAPGQGLEWMGIINPSG | ADI-14411 | Heavy chain variable region |
| | | GGTSYAQNFQDRVTMTRDTSTSTVYMELSSLRSEDTAVYYCARNGYSTRSLQNNW | | (“HC”) amino acid sequence |
| | | FDPWGQGTLVTVSS | | |
| Ab 77 | 154 | ETTLTQSPSSLSASVGDRVTITCRASQSIDNYLNWYQQKPGKAPKLLIYEASSLQSGV | ADI-14411 | Light chain variable region |
| | | PSRFSGSGSGTDFTLTISSLQPEDFATYYCQQTYSSLPYTFGQGTKVEIK | | (“LC”) amino acid sequence |
| Ab 78 | 155 | QVQLVQSGAEVKKPGASVKVSCKASGYTFTRYGISWVRQAPGQGLEWMGWISDY | ADI-14412 | Heavy chain variable region |
| | | NGNTKNAEKFQGRVTMTTDTYTNIAYMELRSLRSDDTAVYYCARDWWITVGGIIA | | (“HC”) amino acid sequence |
| | | PFDYWGQGTLVTVSS | | |
| Ab 78 | 156 | ETTLIQSPGILSLSPGERATLSCRASQSVSSDYLAWFQQKPGQAPRLLIYGASSRAT | ADI-14412 | Light chain variable region |
| | | DIPDRFSGSGSGTDFTLTISRLESEDFAVYYCLHYAGARTFGQGTKVEIK | | (“LC”) amino acid sequence |
| Ab 79 | 157 | EVQLVESGGVVVQPGGSLRLSCAASGFNFDDYSMHWVRQAPGKGLEWVSVISW | ADI-14413 | Heavy chain variable region |
| | | DGGITYYADSVKGRFTMSRDNGKKSLYLQMNSLRTEDTAVYYCGKDGDIYSSSSAG | | (“HC”) amino acid sequence |
| | | IDYWGQGTLVTVSS | | |
| Ab 79 | 158 | SYVLTQPPSASGTPGQRVIISCSGSSSNIGSHTVKWYQQLPGTAPKLLIDRNNQRPS | ADI-14413 | Light chain variable region |
| | | GVPDRFSGPKSGTSASLAISGLQSEDEADYYCASWDDSLNGPVFGGGTQLTVL | | (“LC”) amino acid sequence |
| Ab 80 | 159 | QVQLVQSGAEVKKPGSSMKVSCKASGGSFSSYGISWLRQAPGQAPEWMGGIIPIF | ADI-14414 | Heavy chain variable region |
| | | GTINYAQKFQGRITISADESTSTVYMELSSLRIEDTAVYYCARDGRTSPRYYGWDVW | | (“HC”) amino acid sequence |
| | | GQGTTVTVSS | | |
| Ab 80 | 160 | DIRLTQSPATLSLSPGDRATLSCRASQSLYTYLSWYQQKPGQAPRLLIYDASNRATGI | ADI-14414 | Light chain variable region |
| | | PARFSGSGSGTDFTLTISSLEPEDFAVYYCHYRSNWPPCTFGGGTKVDIK | | (“LC”) amino acid sequence |
| Ab 81 | 161 | EVQLVESGPGLVKPSETLSLTCTVSGGSISNYYWTWIRQPPGEGLEWIGYIYYTGST | ADI-14415 | Heavy chain variable region |
| | | NYNPSLKNRVTISVDTPKNQFSLKLNSVTAADTAVYYCARGWGYSYGYESYYNGLD | | (“HC”) amino acid sequence |
| | | VWGQGTTVTVSS | | |
| Ab 81 | 162 | DIQLTQSPSFLSASVGDRVTITCRASQGISSYLAWYQLKPGKAPKLLIYAAATLETGVP | ADI-14415 | Light chain variable region |
| | | SRFSGSGSGTEFTLTISGLQPEDFATYYCQQLNSFPFTFGPGTKVEIK | | (“LC”) amino acid sequence |
| Ab 82 | 163 | QVQLVQSGAEVKKPGESLKISCKGSGDTFSRNWIGWVRQMPGKGLEWMGIIWP | ADI-14416 | Heavy chain variable region |
| | | GDSDTRYRQFFQGQQGQVIISVDKSISTAYLQWSSLKASDTATYYCATSPYGLGSYY | | (“HC”) amino acid sequence |
| | | EHWGQGTLVTVSS | | |
| Ab 82 | 164 | NFMLTQPHSLSDSPGKTVVISCTRSSGSIASNYVQWYQQRPGSAPTTVIYEDNQRP | ADI-14416 | Light chain variable region |
| | | SGVPDRFSGSIDSSSNSASLTISGLKTEDEADYYCQSYDSSNPYVFGTGTKVTVL | | (“LC”) amino acid sequence |
| Ab 83 | 165 | EVQLVESGGGLVKPGGSLRLSCAASGFSFSSYSMHWVRQAPGKGLEWVSSISGSST | ADI-14417 | Heavy chain variable region |
| | | YIYHADSVKGRFTISRDNAERSLHLQMNSLRAEDTAVYYCARDPYSSGWLDSWGQ | | (“HC”) amino acid sequence |
| | | GTLVTVSS | | |
| Ab 83 | 166 | ETTLTQSPATLSVSPGERATLSCRASQSVSGNLAWYQQKPGQAPRLLIYGTSTRATG | ADI-14417 | Light chain variable region |
| | | IPARFSGSGSGTEFTLSISSLQSEDFAVYYCQQYNKWPRYTFGQGTKLEIK | | (“LC”) amino acid sequence |
| Ab 84 | 167 | QVQLVQSGAEVKKPGSSVKVSCKASGGTFTNYNINWVRQAPGQGLQWMGRISP | ADI-14418 | Heavy chain variable region |
| | | TFAIANYAQKFQGRVTITADKSTSTAYMELSSLRSEDTAVYYCARAPHSGYDLALDY | | (“HC”) amino acid sequence |
| | | WGQGTLVTVSS | | |
| Ab 84 | 168 | DIQMTQSPSTLSASVGDRVTITCRASQSISSWLAWYQQKPGKAPKLLIYEASSLQSG | ADI-14418 | Light chain variable region |
| | | VPSRFSGSGSGTEFTLTITSLQPDDFATYYCQQYNVYPWTFGQGTKVDIK | | (“LC”) amino acid sequence |
| Ab 85 | 169 | EVQLVESGGGVVQPGGSLRLSCAASGFSFSDYGMHWVRQAPGKGLEWVSFIRYD | ADI-14419 | Heavy chain variable region |
| | | ASYKFYADSVKGRFTISRDNAKNTLYLQINSLRAEDTAVYYCAKEIYGSGSYYYYYYAI | | (“HC”) amino acid sequence |
| | | DVWGQGTTVTVSS | | |
| Ab 85 | 170 | EIVLTQSPGTLSLSPGERATLSCRASQSVSSSHLAWYQQKPGQAPRLLIYGASSRATG | ADI-14419 | Light chain variable region |
| | | IPDRFSGSGSGTDFTLTISRLEPEDFAVYYCQQYFRSAWAFGQGTKVDIK | | (“LC”) amino acid sequence |
| Ab 86 | 171 | EVQLVESGGVVVQPGGSLRLSCAASGFNFDDYAMHWVRQAPGKGLEWVSLISW | ADI-14420 | Heavy chain variable region |
| | | DGGNTYYSDSVKGRFTISRDNGKNSLYLQMNSLRAEDTALYYCAKDIDRYSGYDYV | | (“HC”) amino acid sequence |
| | | FHYWGQGTLVTVSS | | |
| Ab 86 | 172 | DIRLTQSPSTLSAYVGDRVTITCRASQSISSWLAWYQQKPGKAPKLLIYKASSLESGV | ADI-14420 | Light chain variable region |
| | | PSRFTGSGSGTEFTLTISGLQPDDFATYYCQQYNSYSTFGGGTKVDIK | | (“LC”) amino acid sequence |
| Ab 87 | 173 | QVQLVQSGAEVKKPGESLKISCKGSGYNSSINWIGYWIGWVRQMPGKGLEWMGI | ADI-14421 | Heavy chain variable region |
| | | INPGDSDTRYSPSFQGQVTISVDKSISTAYLQWGSLKASDTAMYYCARRAYRSGWH | | (“HC”) amino acid sequence |
| | | FDLWGRGTLVTVSS | | |
| Ab 87 | 174 | EIVMTQSPATLSVSPGERATLTCRASQSVSSNLAWYQQKPGQAPRLLIYGASTRAT | ADI-14421 | Light chain variable region |
| | | GIPARFSGSGSGTQFTLTISSLQSEDFAVYYCQHYNNWPPYTFGQGTKVEIK | | (“LC”) amino acid sequence |
| Ab 88 | 175 | QVQLVQSGAEVKKPGSSVKVSCKASGGTFSSYTINWVRQAPGQGLEWMGRIIPIL | ADI-14422 | Heavy chain variable region |
| | | GIANYAQKFQGRVTITADKSTSTAYMELSSLRSEDTAVYYCARRHQDTYGMDVWG | | (“HC”) amino acid sequence |
| | | QGTTVTVSS | | |
| Ab 88 | 176 | QSVLTQPPSVSGAPGQRVTISCTGSSSNIGAGYDVHWYQQLPGTAPKLLIYGNSNR | ADI-14422 | Light chain variable region |
| | | PSGVPDRFSGSKSGTSASLAITGLQAEDEADYYCQSYDSSLSGSVFGGGTKVTVL | | (“LC”) amino acid sequence |
| Ab 89 | 177 | EVQLVESGGVVIQPGGSLRLSCAASGFNFDDYSMHWVRQAPGKGLEWVSLISWD | ADI-14423 | Heavy chain variable region |
| | | GGITYYADSVKGRFTISRDNGKKSLYLQMNSLRTEDTALYYCAKDIDIYSDYAGYFDY | | (“HC”) amino acid sequence |
| | | WGQGTLVTVSS | | |
| Ab 89 | 178 | DIRMTQSPSSLSASVGDRVTITCRASQGIRNDLGWYQQKPGKAPKRLIYAASSLQSG | ADI-14423 | Light chain variable region |
| | | VPSRFSGSGSGTEFTLTISSLQPEDFATYYCLQHNSYPFTFGQGTRLEIK | | (“LC”) amino acid sequence |
| Ab 90 | 179 | QVQLVQSGAEVKKPGESLKISCKGPDSSFSVYWIAWVRQMPGKGLEWMGVIYVG | ADI-14424 | Heavy chain variable region |
| | | DSDTRYSPSFRGQVTISADKSMNTAYLQWSSLKASDTAMYFCARHIPPGPFDLWG | | (“HC”) amino acid sequence |
| | | QGTMVTVSS | | |
| Ab 90 | 180 | NFMLTQPHSVSASPGKTITISCTRSSGSIASNSVQWYQQRPGSAPTNVIYEDDQRPL | ADI-14424 | Light chain variable region |
| | | GVPNRFSGSIDSSSNSASLTISGLKTEDEADYYCHSYHNSDQVFGGGTKLTVL | | (“LC”) amino acid sequence |
| Ab 91 | 181 | QVQLQESGPGLVKPSETLSLTCTVSGGSVRSGSYYWSWIRQPPGKALEWIGYIYYSG | ADI-14425 | Heavy chain variable region |
| | | STNYNPALESRVTISVDTSKNQFSLMLSSVTAADTAVYYCARSAEGLARLYYFDHWG | | (“HC”) amino acid sequence |
| | | QGTLVTVSS | | |
| Ab 91 | 182 | QSVLIQPASVSGSPGQSITISCTGTSSDVGGYNYVSWYQQHPGKAPKLMIHDVSNR | ADI-14425 | Light chain variable region |
| | | PSGVSNRFSGSKSGNTASLTISGLQAEDEADYYCSTYRSSNTLVVFGGGTKLTVL | | (“LC”) amino acid sequence |
| Ab 92 | 183 | EVQLVESGGGVVQPGRSLRLSCAASGFTFSSFPMHWVRQAPGKGLEWVAVASYD | ADI-14426 | Heavy chain variable region |
| | | GRNNYYAGSVKGRFTISRDNSKNTLYLQINSLRAEDTAVYYCAREVVIAAHFDYWG | | (“HC”) amino acid sequence |
| | | QGTLVTVSS | | |
| Ab 92 | 184 | SSELTQEPAVSVALGQTVRITCQGDSLRSFYANWYQQKPGQAPILVIYGKNDRPSGI | ADI-14426 | Light chain variable region |
| | | PDRFSGSNSGNTASLTITGAQAEDEADYYCNSRDSSGNHRVFGGGTKVTVL | | (“LC”) amino acid sequence |
| Ab 93 | 185 | QVQLVQSGAEVKKPGSSVKVSCKASGGTFNSYTINWVRQAPGQGLEWMGRIITIP | ADI-14427 | Heavy chain variable region |
| | | GATNYAQKFQGRVTFTADKSTSTAYMELSSLRSEDTAVYFCAKRGTGYYGMDVW | | (“HC”) amino acid sequence |
| | | GQGTTVTVSS | | |
| Ab 93 | 186 | QSVLIQPRSVSGSPGQSVTISCTGTSSDVGGYNYVSWYQQHPGKAPKLMIYDVSER | ADI-14427 | Light chain variable region |
| | | PSGVPDRFSGSKSGNTASLTISGLQAEDEADYYCCSFVGIYILVFGGGTKLTVL | | (“LC”) amino acid sequence |
| Ab 94 | 187 | EVQLLESGGGLVKPGGSLRLSCAASGFTFSDHYMSWIRQAPGKGLEWVSYISSTSSF | ADI-14428 | Heavy chain variable region |
| | | TNYADSLKGRFTISRDNAKNSLYLQMNSLRAEDTAVYYCARPYIVALGTRAFDIWG | | (“HC”) amino acid sequence |
| | | QGTTVTVSS | | |
| Ab 94 | 188 | SYVLIQPPSVSVAPGKTARITCGGNNIGSKTVHWYQQKPGQAPVLVSYYDSDRPSG | ADI-14428 | Light chain variable region |
| | | IPERFSGSNSGNTATLTISRVEAGDEADYYCQVWDGSSEHYVFGTGTKVTVL | | (“LC”) amino acid sequence |
| Ab 95 | 189 | QVQLVQSGTEVKKPGSSVKVSCKASGGTFSSYTISWVRQAPGQGLEWMGGITPM | ADI-14564 | Heavy chain variable region |
| | | VGTPNYAQKFQGRVAITADKSTNTAYMELTSLISGDTAVYYCARLVYGSGSHFDYW | | (“HC”) amino acid sequence |
| | | GQGTLVTVSS | | |
| Ab 95 | 190 | SSELSQDPAVSVALGQTVRITCQGDSLRSFYASWYQQQPGQAPVLVLYGQDNRPS | ADI-14564 | Light chain variable region |
| | | GIPDRFSGSSSGNTASLTITGAQAEDEADYYCNSRNSSGHHWVFGGGTKVTVL | | (“LC”) amino acid sequence |
| Ab 96 | 191 | EVQLLESGGGLVKPGGSLRLSCAASGFTFSNAWMSWVRQAPGKGLEWVGRIKSKT | ADI-14565 | Heavy chain variable region |
| | | DGGTTDYAAPVKGRFTISRDDSKNTLYLQMNSLKTEDTAVYYCTTDRFCSSTSCEYY | | (“HC”) amino acid sequence |
| | | YYYYGMDVWGQGTTVTVSS | | |
| Ab 96 | 192 | ETTLIQSPSSLSASVGDRVTITCRASQSISSYLNWYQQKPGKAPKLLIYAASSLQSGV | ADI-14565 | Light chain variable region |
| | | PSRFSGSGSGTDFTLTISSLQPEDFATYYCQQSYSTPYTFGQGTKVEIK | | (“LC”) amino acid sequence |
| Ab 97 | 193 | QVQLLESGGGVVQPGRSLRLSCAASGFTFSSFPMHWVRQAPGKGLEWVAVASYD | ADI-14566 | Heavy chain variable region |
| | | GRNNYYAGSVKGRFTISRDNSKNTLYLQINSLRAEDTAVYYCAREVVIAAHFDYWG | | (“HC”) amino acid sequence |
| | | QGTLVTVSS | | |
| Ab 97 | 194 | SSELTQEPAVSVALGQTVRITCQGDSLRSFYANWYQQKPGQAPILVIYGKNDRPSGI | ADI-14566 | Light chain variable region |
| | | PDRFSGSNSGNTASLTITGAQAEDEADYYCNSRDSSGNHRVFGGGTKVTVL | | (“LC”) amino acid sequence |
| Ab 98 | 195 | QVQLVQSGAEVKKPGASVRVSCKASGYTFNSYSISWVRQAPGQGLEWMGWISVH | ADI-14567 | Heavy chain variable region |
| | | NGNTNYTQKFQGRVTMTTDTSTSTTYMELRSLRSDDTAVYYCIFGELLYDVWGQG | | (“HC”) amino acid sequence |
| | | TTVTVSS | | |
| Ab 98 | 196 | DIQLTQSPSSLSASVGDRVTITCRASQGISNYLAWYQQKPGKVPNLLIYAASTLQSG | ADI-14567 | Light chain variable region |
| | | VPSRFSGSGSGTDFTLTISSLQPEDVATYYCQKYNSAPLTFGPGTKVEIK | | (“LC”) amino acid sequence |
| Ab 99 | 197 | EVQLVESGGGVVQPGRSLRLSCAASGFTFSSYGMHWVRQAPGKGLEWVAVIWYD | ADI-14568 | Heavy chain variable region |
| | | GSNKYYADSVKGRFTISRDNSKNTLYLQMNSLRAEDTAVYYCARDIAAAGTMRAFD | | (“HC”) amino acid sequence |
| | | IWGQGTTVTVSS | | |
| Ab 99 | 198 | QSVLIQPASVSGSPGQSITISCTGTSSDVGGYNYVSWYQQHPGKAPKLMIYDVSNR | ADI-14568 | Light chain variable region |
| | | PSGVSNRFSGSKSGNTASLTISGLQAEDEADYYCSSYTSSSTLVVFGGGTKLTVL | | (“LC”) amino acid sequence |
| Ab 100 | 199 | QVQLVESGGGFVKPGGSLRLSCAASGFTFSDYYMSWIRQAPGKGLEWLSYISSTSLF | ADI-14569 | Heavy chain variable region |
| | | TYYADSVKGRFTISRDNAKNSLYLQMNSLRADDTAVYYCARAYGKGTMVGYWGQ | | (“HC”) amino acid sequence |
| | | GTMVTVSS | | |
| Ab 100 | 200 | EIVMTQSPGTLSLAPGERATLSCRASQSVSIDYLAWYQHKPGQAPRLLIYTASNRAT | ADI-14569 | Light chain variable region |
| | | GIPDRFSGSGSGTDFTLTISRLEPEDVAMYYCQQYGNSPYTFGQGTKVEIK | | (“LC”) amino acid sequence |
| Ab 101 | 201 | QVQLVQSGAEVKKPGSSVKVSCKASGGTFSTYTITWVRQAPGQGLEWMGRIVPIF | ADI-14571 | Heavy chain variable region |
| | | GVVNNAQKFLGRLTITADKSTSTAYMELSSLRSEDTAVYYCARIPCSGNCQDYYYG | | (“HC”) amino acid sequence |
| | | MDVWGQGTTVTVSS | | |
| Ab 101 | 202 | DIQLTQSPSFLSASVGDRVTITCRASQGISSYLVWYQQKPGKAPKLLIYAASTLQSGV | ADI-14571 | Light chain variable region |
| | | PSRFSGSGSGTEFTLTISSLQPEDFATYYCQQLNNYPPTFGPGTKVDIK | | (“LC”) amino acid sequence |
| Ab 102 | 203 | QVQLVQSGGGLVKPGGSLRLSCAASGFTFSNAWISWVRQAPGKGLEWVGRIKSAT | ADI-14572 | Heavy chain variable region |
| | | DGGTTDYAAPVKGRFTISRDDSKNTLYLQMDSLKTEDTAVYYCTTSYPYFDWLPFSV | | (“HC”) amino acid sequence |
| | | DYWGQGTLVTVSS | | |
| Ab 102 | 204 | SYELMQPPSASGTPGQRVTISCSGSNSNIGSNTVSWYQQLPGTAPKLLIYNNNQRP | ADI-14572 | Light chain variable region |
| | | SGVPDRFSGSKSGTSASLAISGLQSEDEADYYCATWDDSLNGWVFGGGTKLTVL | | (“LC”) amino acid sequence |
| Ab 103 | 205 | QVQLVQSGAEVKKPGASVKVSCKASGYTFTTYGISWVRQAPGQGLEWMGWISTY | ADI-14573 | Heavy chain variable region |
| | | KTYTNYAQKFQGRVTMTTDTSTSTAYMELRSLRSDDTAVYYCAKVAGGSGSYGDY | | (“HC”) amino acid sequence |
| | | WGQGTLVTVSS | | |
| Ab 103 | 206 | QPVLTQPPSVSVAPGKTARITCGGNNIGSKSVHWYLQKPGQAPVLVIYYDSDRPSGI | ADI-14573 | Light chain variable region |
| | | PERFSGSNSGNTATLTISRVEAGDEADFFCQVWDSSSDHWVFGGGTKVTVL | | (“LC”) amino acid sequence |
| Ab 104 | 207 | QVQLVQSGAEVKKPGSSVKVSCKASGGTFSSYTISWVRQAPGQGLEWMGRIIPILG | ADI-14575 | Heavy chain variable region |
| | | IANYAQKFQGRVTITADKSTSTAYMELSSLRSEDTAVYYCARPSSSSFAFDYWGQGT | | (“HC”) amino acid sequence |
| | | LVTVSS | | |
| Ab 104 | 208 | QSVLTQPASVSGSPGQSITISCTGTSSDVGGYNYVSWYQQHPGKAPKLMIYDVSNR | ADI-14575 | Light chain variable region |
| | | PSGVSNRFSGSKSGNTASLTISGLQAEDEADYYCSSYTSSSTPVVFGGGTKVTVL | | (“LC”) amino acid sequence |
| Ab 105 | 209 | QVQLVQSGAEVKKPGASVKVSCKASGYTFTSYGISWVRQAPGQGLEWMGWISAY | ADI-14576 | Heavy chain variable region |
| | | NGNTNYAQKLQGRVTMTTDTSTSTAYMELRSLRSDDTAVYYCARDPPVIAAGDFQ | | (“HC”) amino acid sequence |
| | | HWGQGTLVTVSS | | |
| Ab 105 | 210 | DIVLTQSPLSLPVTLGQPASISCRSSQSLVHSDGNTYLNWFQQRPGQSPRRLIYKVS | ADI-14576 | Light chain variable region |
| | | NRDSGVPDRFSGSGSGTDFTLKISRVEAEDVGVYYCMQGTHWPPDFGQGTRLEIK | | (“LC”) amino acid sequence |
| Ab 106 | 211 | QVQLVQSGAEVKKPGASVKVSCKASGYTFTNYGITWVRQAPGQGLEWMGWISA | ADI-14577 | Heavy chain variable region |
| | | YNGVRNYAQKLQGRVTMTIDTSRTTAYMELKNLRSDDTAMYYCARGPPVIAADDF | | (“HC”) amino acid sequence |
| | | QHWGQGTMVIVSS | | |
| Ab 106 | 212 | DIQMTQSPLSLPVTLGQPASISCRSSQSLVHSNGDTYLNWFQQRPGRSPRRLIYKVS | ADI-14577 | Light chain variable region |
| | | NRDSGVPDRFSGSGSGTDFTLKISRVEAEDVGVYYCMQGTHWPPDFGQGTRLEIK | | (“LC”) amino acid sequence |
| Ab 107 | 213 | QVQLVQSGAEVKKPGSSVKVSCKASGGTFNNYAINWVRQAPGQGLEWMGGIIP | ADI-14578 | Heavy chain variable region |
| | | MFGTANYAQKFQGRVTMTADESTSTAYMELSSLRSEDTAVYYCASSQIFVGGNYY | | (“HC”) amino acid sequence |
| | | KLEFDNWGQGTLVTVSS | | |
| Ab 107 | 214 | QSVLTQPPSVSAAPGQKVTISCSGSNSNIGYNDVSWYQQLPGTAPQLLIYDNNKRT | ADI-14578 | Light chain variable region |
| | | SGIPDRFSGSKFGTSATLGITGLQTGDEADYYCGTWDSSLSTVIFGGGTKLTVL | | (“LC”) amino acid sequence |
| Ab 108 | 215 | QVQLVQSGAEVKKPGESLKISCKVSGYSFTSYWIGWVRQMPGKGLEWMGIIYPGD | ADI-14579 | Heavy chain variable region |
| | | SDTRYSPSFQGQVTISADKSITTAYLQWSSLKASDTAMYYCARPAHSSSWYGAFDL | | (“HC”) amino acid sequence |
| | | WGQGTTVTVSS | | |
| Ab 108 | 216 | DIQMTQSPSSLSASVGDRVTITCRASQGISNYLAWYQQKPGKVPKLLIYAASTLQSG | ADI-14579 | Light chain variable region |
| | | VPSRFSGSGSGTDFTLTISSLQPEDVATYYCQKYNSAPLTFGGGTKVEIK | | (“LC”) amino acid sequence |
| Ab 109 | 217 | QVQLVQSGAEVKKPGSSVKVSCKASGGTFSSYTINWVRQAPGQGLEWMGRIIPVL | ADI-14580 | Heavy chain variable region |
| | | GMASYVQNFQGRVSITADESTSTAYMELSSLTSEDTALYYCAKGAVAAANDVFDV | | (“HC”) amino acid sequence |
| | | WGQGTTVTVSS | | |
| Ab 109 | 218 | DIQMTQSPDSLAVSLGERATINCKSSQSVFYSSNNKHYLAWYQQKPGQPPKLLFY | ADI-14580 | Light chain variable region |
| | | WASTRESGVPDRFSGSGSGTDFTLTISSLQAEDVAVYYCQQYYRIPYTFGQGTKVEI | | (“LC”) amino acid sequence |
| | | K | | |
| Ab 110 | 219 | QVQLVQSGAEVKKPGSSVKVSCKASGGTFSSHAFSWVRQAPGQGLEWMGGIIPSL | ADI-14581 | Heavy chain variable region |
| | | NTANYAQKFQGRVSITADESTGTAYMELSSLRSDDTAVYFCAREVFGYGYYFDYWG | | (“HC”) amino acid sequence |
| | | QGTLVTVSS | | |
| Ab 110 | 220 | ETTLTQSPATLSVSPGERATLSCRASQNVNSNLAWYQQKPGQAPRLLIYGASTRAT | ADI-14581 | Light chain variable region |
| | | GIPARFSGSGSGTDFTLTISSLQSEDFAVYYCQQYNMWPPFTFGQGTKLEIK | | (“LC”) amino acid sequence |
| Ab 111 | 221 | QVQLVQSGAEVKKPGESLKISCKGPDSSFSVYWIAWVRQMPGKGLEWMGVIYVG | ADI-14582 | Heavy chain variable region |
| | | DSDTRYSPSFRGQVTISADKSINTAYLQWSSLKASDTAMYFCARHIPPGPFDLWGQ | | (“HC”) amino acid sequence |
| | | GTTVTVSS | | |
| Ab 111 | 222 | NFMLTQPHSVSASPGKTITISCTRSSGSIASNSVQWYQQRPGSAPTNVIYEDNQRPL | ADI-14582 | Light chain variable region |
| | | GVPNRFSGSIDSSSNSASLTISGLKTEDEADYYCQSYHSSDQVFGGGTKVTVL | | (“LC”) amino acid sequence |
| Ab 112 | 223 | QVQLVQSGAEVKEPGASVKVSCKASGYTFTNYGISWVRQAPGQGLEWLGWISAY | ADI-14583 | Heavy chain variable region |
| | | NGNIHYAQKVQGRVTMTTDTSTSTGFMELRSLRSDDTAVYYCAREPPVIAAGDFQ | | (“HC”) amino acid sequence |
| | | HWGQGTLVTVSS | | |
| Ab 112 | 224 | ETTLTQSPLSLPVTLGQPASISCRSSQSLVHSNGNTYLSWFQQRPGQSPRRLIYRVSN | ADI-14583 | Light chain variable region |
| | | RDSGVPDRFSGSGSGTDFTLKISRVEAEDVGLYYCMQGTHWPPDFGQGTRLEIK | | (“LC”) amino acid sequence |
| Ab 113 | 225 | QVQLVQSGAEVKKPGASVKVSCKASGFTFTNYGTSYGITWVRQAPGQGLEWMG | ADI-14584 | Heavy chain variable region |
| | | WINTSNGNPNYAQKLQGRVTMTADTSTSTAYMELRSLISDDTAVYYCARGHRMV | | (“HC”) amino acid sequence |
| | | RGVVPTGYYGLDVWGQGTTVTVSS | | |
| Ab 113 | 226 | DIQLTQSPSSLSASVGDRVTITCRASQSISSYLNWYQQKPGKAPKLLIFAASNLQSGV | ADI-14584 | Light chain variable region |
| | | PSRFSGSGSGTDFTLTISSLQPEDFATYYCQQSYITPWTFGQGTKVEIK | | (“LC”) amino acid sequence |
| Ab 114 | 227 | QVQLVQSGAEVKKPGASVKVSCKASGYTFANYGIGWVRQAPGQGLEWMGWISA | ADI-14585 | Heavy chain variable region |
| | | YNGKTNYAQKFQGRVTMTTDTSTSTAYMELRSLRSDDTAVYYCAREPPVIAAGDFP | | (“HC”) amino acid sequence |
| | | HWGQGTLVTVSS | | |
| Ab 114 | 228 | ETTLTQSPLSLPVTLGQPASISCRSSQSLEHSDLNTYLSWFQQRPGQSPRRLIYKVSN | ADI-14585 | Light chain variable region |
| | | RDSGVPDRFSGSGSGTDFTLRISRVEAEDVGVYYCMQGTHWPPDFGQGTRLEIK | | (“LC”) amino acid sequence |
| Ab 115 | 229 | QVQLVQSGGGLVKPGGSLRLSCAASGFTFSDYYMSWIRQAPGKGLEWVSYISSSSS | ADI-14586 | Heavy chain variable region |
| | | YTNYADSVKGRFTISRDNAKNSLYLQMNSLRAEDTAVYYCAKRTEYCSSTGCAYYFD | | (“HC”) amino acid sequence |
| | | YWGQGTLVTVSS | | |
| Ab 115 | 230 | QSVVTQPPSVSGAPGQRVTISCTGSSSNIGAGYDVHWYQQLPGTAPKLLIYGNSNR | ADI-14586 | Light chain variable region |
| | | PSGVPDRFSGSKSGTSASLAITGLQAEDEADYYCQSYDSSLSGSVFGGGTKVTVL | | (“LC”) amino acid sequence |
| Ab 116 | 231 | EVQLLESGGGLVKPGGSLRLSCAASGFTLTSYSMNWVRQAPGKGLEWVSSISSSSS | ADI-14587 | Heavy chain variable region |
| | | YIHYADSVKGRFTISRDNAKNSLYLQMNSLRAEDTAVYYCAGSSLYPPFFDYWGQG | | (“HC”) amino acid sequence |
| | | TLVTVSS | | |
| Ab 116 | 232 | QSVVTQPPSVSGAPGQRVTISCTGSSSNLGAGYDVHWYQQLPGTAPKLLIYGNNN | ADI-14587 | Light chain variable region |
| | | RPSGVPDRFSGSKSGTSASLAITGLQAEDEADYYCQSYDSSLSSVVEGGGTKLTVL | | (“LC”) amino acid sequence |
| Ab 117 | 233 | QVQLVQSGAEVKKPGASVKVSCKVSGDTLTELSIHWVRQAPGKGHEWMGYFDHE | ADI-14588 | Heavy chain variable region |
| | | DGEIMYAQKFQGRVTMTGDTSTDTAYMELSSLRSEDTAVYYCATVAAAGQFDYW | | (“HC”) amino acid sequence |
| | | GQGTLVTVSS | | |
| Ab 117 | 234 | DIQLTQSPSSLSASVGDRVTITCRARQSISTYLNWYQQKPGKAPKLLIYAASSLQSGV | ADI-14588 | Light chain variable region |
| | | PSRFSGSGSGTDFTLTISSLQPEDFATYYCQQSYSSPYTFGQGTKVDIK | | (“LC”) amino acid sequence |
| Ab 118 | 235 | QITLKESGPVLVKPSETLTLTCTVSGFSLSNAKMGVSWIRQPPGKALEWLAHIFSND | ADI-14589 | Heavy chain variable region |
| | | EKSYNTSLKNRLTISKDTSKSQVVLTMTNMDTVDTATYYCARINYYDSSGYYLANFD | | (“HC”) amino acid sequence |
| | | YWGQGTLVTVSS | | |
| Ab 118 | 236 | NIRLTQSPSSLSASVGDRVTITCRASQRIASYLNWYQQKPGHAPKLLIHAASSLQSGV | ADI-14589 | Light chain variable region |
| | | PSRFSGSGSGTDFTLTINSLLPEDFATYYCQQSYSSPPHSSPPLTFGGGTKVEIK | | (“LC”) amino acid sequence |
| Ab 119 | 237 | EVQLVESGAEVKKPGESLKISCKGSGYSFATYWIGWVRQMPGKGLEWMGIIYPGD | ADI-14590 | Heavy chain variable region |
| | | SDTRYSPSFQGQVTISADKSISTAYLQWSSLKASDTAIYYCARAKLPVAGLYYFDYWG | | (“HC”) amino acid sequence |
| | | QGTLVTVSS | | |
| Ab 119 | 238 | DIQLTQSPSSLSASVGDRVTITCRASQGISSTLAWYQQKPGKAPKLLIYDASSLESGV | ADI-14590 | Light chain variable region |
| | | PSRFSGSGSGTDFTLTISSLHPEDFATYYCQQFNTYPTFGGGTKVEIK | | (“LC”) amino acid sequence |
| Ab 120 | 239 | QVQLVQSGAEVKKPGESLRISCTGSGYTFTNYWISWVRQMPGKGLEWMGRIDPT | ADI-14591 | Heavy chain variable region |
| | | DSYTNYSPSFQGHVTISADKSISTAYLQSSSLKASDTATYYCARHRRLVPAAMSRGYY | | (“HC”) amino acid sequence |
| | | GMDVWGQGTTVTVSS | | |
| Ab 120 | 240 | EIVMTQSPSSLSASVGDRATITCRASQSISSYLNWYQQKPGKAPKLLIYAASNLQSGA | ADI-14591 | Light chain variable region |
| | | PSRFSGSGSGTDFTLTISSLQPEDFATYFCQQTYSTPYTFGQGTKVEIK | | (“LC”) amino acid sequence |
| Ab 121 | 241 | QVQLVQSGAEVKKPGESLKISCKGSGYTFTNYWIGWVRQMPGKGLEWMGIIYPD | ADI-14592 | Heavy chain variable region |
| | | DSDTRYSPSFQGQVTISVDKSINTAYLQWSSLRASDTAIYYCACSNWPHYFDSWGQ | | (“HC”) amino acid sequence |
| | | GTLVTVSS | | |
| Ab 121 | 242 | NFMLTQPHSVSESPGKTVTISCTRSSGNIAGNYVQWYQQRPGSAPTTVIYEDNQRP | ADI-14592 | Light chain variable region |
| | | SGVPDRFSGSIDSSSNSASLTISGLKTEDEAVYYCQSYHPGNWVFGGGTKLTVL | | (“LC”) amino acid sequence |
| Ab 122 | 243 | QVQLVQSGAEVKKPGESLKISCKGSGYSFSSYWVAWVRQMPGKGLEWMGIIYPA | ADI-14593 | Heavy chain variable region |
| | | DSDTRYSPSFQGQVTISADKSDSTAYLQWGSLKASDTAMYYCARSLYGSGDYFDY | | (“HC”) amino acid sequence |
| | | WGQGTLVTVSS | | |
| Ab 122 | 244 | NFMLTQPHSVSESPGRTVIISCTRSSGSIATNYVQWYQQRPGSAPTTVIYEDNQRPS | ADI-14593 | Light chain variable region |
| | | GVPDRFSGSIDSSSNSASLTISGLKTEDEADYYCQSYGSGDVVFGGGTKVTVL | | (“LC”) amino acid sequence |
| Ab 123 | 245 | QVQLVQSGAEVKKPGASVKLSCKASGYTFTTYTINWVRQAPGQGLEWMGWISGY | ADI-14594 | Heavy chain variable region |
| | | NGNTDYAQKLQGRFTMTIDTSTNTAYMELRSLTSDDTAVYYCAKGGGGSESYFDY | | (“HC”) amino acid sequence |
| | | WGQGTLVTVSS | | |
| Ab 123 | 246 | SYELTQPPSVSVAPGKTARISCGGNNIGSKSVHWYQQKPGQAPVLVIYYDRDRPSGI | ADI-14594 | Light chain variable region |
| | | PERFSGSNSGNTATLTISRVEAGDEADYYCQLWDRSSDHPYVFGTGTKVTVL | | (“LC”) amino acid sequence |
| Ab 124 | 247 | EVQLLESGGGLVQPGGSLRLSCAASGFTFSIYSMNWVRQAPGKGLEWISYISRSGST | ADI-14595 | Heavy chain variable region |
| | | IFYADSVKGRFTISRDDAKNSLFLQMTSLRDADTAVYYCARVDCSNNKCYDYWGQ | | (“HC”) amino acid sequence |
| | | GTLVTVSS | | |
| Ab 124 | 248 | DIQLTQSPATLSLSPGERATLSCRASQSISSFLAWYQQKPGQAPRLLIYDASKRATGT | ADI-14595 | Light chain variable region |
| | | PARFSGGGSGRDFTLTISSLEPEDFAVYYCQQRSSWPLYTFGQGTKVEIK | | (“LC”) amino acid sequence |
| Ab 125 | 249 | EVQLVESGGVVVQPGGSLRLSCAVSGFNFDDYSMHWVRQLPGKGLEWVSLISWD | ADI-14597 | Heavy chain variable region |
| | | GGITYYADSVKGRFTISRDNSKNSLYLQMNSLRTEDTALYYCAKDGNRYSDNDYYFD | | (“HC”) amino acid sequence |
| | | YWGQGTLVTVSS | | |
| Ab 125 | 250 | DIRLTQSPGILSLSPGERATLSCRASQGVSSSYLAWYQQKPGQAPRLLIYGASSRAT | ADI-14597 | Light chain variable region |
| | | GIPDRFSGSGSGTDFTLTISRLEPEDFAVYYCQQYGSSPLFGPGTKVEIK | | (“LC”) amino acid sequence |
| Ab 126 | 251 | QVQLVQSGAEVKKPGSSVKVSCKASGGTFSSYAIYWVRQAPGQGLECMGGIIPIFG | ADI-14598 | Heavy chain variable region |
| | | SANYAQKFQGRVTITADESTSTAYMELSSLRSEDTAVYYCATDSLKTTYYYGSSGYFR | | (“HC”) amino acid sequence |
| | | DHVWGQGTTVTVSS | | |
| Ab 126 | 252 | ETTLTQSPSSLSASVGDRVTITCRASQGISNYLAWYQQKPGKVPKLLIFAASTLQSGV | ADI-14598 | Light chain variable region |
| | | PSRFSGSGSGTDFTLTISSLQPEDVATYYCQNFNSVLSFTFGPGTKVDIK | | (“LC”) amino acid sequence |
| Ab 127 | 253 | EVQLVESGGGLVQPGRSLRLSCKTSGFTFGDYAMSWVRQAPGQGLDWVGFIRTK | ADI-14599 | Heavy chain variable region |
| | | AYGGTTEYAASVKGRFTLSRDDSKSIAYLQMNSLKTEDTAVYYCKSGGQFDYWGR | | (“HC”) amino acid sequence |
| | | GTLVTVSS | | |
| Ab 127 | 254 | NFMLTQPHSVSGSPGKTVTISCTGSSGSIASNYVQWYQQRPGSAPTTVICEDNQRP | ADI-14599 | Light chain variable region |
| | | SGVPDRFSGSIDSSSNSASLTISGLKTEDEADYYCQSYDRSNQEVFGGGTKLTVL | | (“LC”) amino acid sequence |
| Ab 128 | 255 | QVQLVQSGGGLVKPGGSLRLSCAASGFSFSDYYMNWIRQAPGKGLEWVSYISSSSS | ADI-14600 | Heavy chain variable region |
| | | YTNYADSVKGRFTISRDNAKKSLYLQMNSLRAEDTAVYYCASQTYSDYARGGAFDI | | (“HC”) amino acid sequence |
| | | WGQGTTVTVSS | | |
| Ab 128 | 256 | QSVLTQPPSVSGAPGQRVTISCTGSSSNIGAGYDVHWYQQLPGTAPKLLIYGNNNR | ADI-14600 | Light chain variable region |
| | | PSGVPDRFSGSKSGTSASLAITGLQAEDEADYYCQSYDSSLSGSVFGIGTKVTVL | | (“LC”) amino acid sequence |
| Ab 129 | 257 | EVQLLESGGGLVQPGGSLRLSCAASGFTFSSYAMNWVRQAPGKGLEWVSTISGSG | ADI-14601 | Heavy chain variable region |
| | | SSTYYADSVEGRFTISRDNSKNTLYLQMNSLRAEDTAIYYCAKEPRDMYIQQWLDS | | (“HC”) amino acid sequence |
| | | WGQGTLVTVSS | | |
| Ab 129 | 258 | GIRLTQSPSSVSASVGDRVIITCRASQGIRSWLAWYQQKPGKAPKLLIYAASRLQSG | ADI-14601 | Light chain variable region |
| | | VPSRFSGSGSETDFTLTISSLQPEDFASYYCQQANSFPLTFGGGTKVEIK | | (“LC”) amino acid sequence |
| Ab 130 | 259 | EVQLVESGGGVVQPGGSLRLSCAASGFSFSSCGMHWVRQVSGKGLEWVAFIRYD | ADI-14602 | Heavy chain variable region |
| | | GSNKFYADSVKGRFTISRDNSKNTLYLQMNSLRVEDTAVYYCAKGGLEDVSTGYSP | | (“HC”) amino acid sequence |
| | | HYYYGMDVWGQGTTVTVSS | | |
| Ab 130 | 260 | QPVLTQPPSVSVSPGQTASITCSGDKLAYKYTCWYQQKPGQSPVLVIFQDSKRPSGI | ADI-14602 | Light chain variable region |
| | | PERFSGSNSGNTATLTISGTQALDEADYYCQAWDSSTVVFGGGTKLTVL | | (“LC”) amino acid sequence |
| Ab 131 | 261 | QVQLVQSGAEVKKPGESLKISCKGSGYTFTNYWIGWVRQMPGKGLEWMGIIYPG | ADI-14603 | Heavy chain variable region |
| | | DSDTRYSPSFQGQVTISADKSITTAYLQWRVLKASDTAMYYCATMRGSSSHFHHW | | (“HC”) amino acid sequence |
| | | GQGTLVTVSS | | |
| Ab 131 | 262 | DIQVTQSPSSLSASVGDRVTITCRAGQGIGNYLAWYQQKPGKVPKVLIYAASTLQSG | ADI-14603 | Light chain variable region |
| | | VPSRFSGSGSGTEFTLTISSLQPEDVATYYCQKYNNAPYAFGQGTRLEIK | | (“LC”) amino acid sequence |
| Ab 132 | 263 | EVQLLESGGGLVQPGGSLRLSCSASGFTFNNYVMHWVRQAPGKGLEDASAISSNG | ADI-14604 | Heavy chain variable region |
| | | VSTNYADSVKGRFTISRDNSKNTLYLQMRSLRAEDTALYYCVRDLIPHDSSAYYGYH | | (“HC”) amino acid sequence |
| | | GMDVWGQGTTVTVSS | | |
| Ab 132 | 264 | QPVLTQPPSASGTPGQSVTISCSGSSSNIGTNVVNWYQQLPGTAPKLLIYSNDLRPS | ADI-14604 | Light chain variable region |
| | | GVPDRFSGSKSGTSASLAISGLQSEDEANYYCAAWDDSLNGVLFGGGTKLTVL | | (“LC”) amino acid sequence |
| Ab 133 | 265 | EVQLLESGPALVKPTQTLTLICTFSGFSLTTSGMCVSWIRQPPGKALEWLARIDWD | ADI-14605 | Heavy chain variable region |
| | | DDQYFSTSLRTRLSISKDTSKNQVVLTMTNMDPVDTATYYCARSALNIAARGFDIW | | (“HC”) amino acid sequence |
| | | GQGTTVTVSS | | |
| Ab 133 | 266 | QPGLTQPPSVSVSPGQTARITCSGDVLPKHFSYWYQQKPGQAPVLVIHRDSERPSG | ADI-14605 | Light chain variable region |
| | | IPERFSGSSSGTTVTLTISGVQAEDEADYYCQFSDITNTVFGGGTKLTVL | | (“LC”) amino acid sequence |
| Ab 134 | 267 | QVQLVQSGGGLVQPGGSLRLSCAASGFTVSSNYMGWVRQAPGKGLEWVSVIYTG | ADI-14606 | Heavy chain variable region |
| | | GSTYYADSVKGRFTISRDNFKNTLYLQMNSLRAEDTALYYCARDLYSSGWFGYWG | | (“HC”) amino acid sequence |
| | | QGTLVTVSS | | |
| Ab 134 | 268 | DIRLTQSPATLSVSPGERATLSCRASQSVSINLGWFQQKPGQSPRLLIYGTSTRATGI | ADI-14606 | Light chain variable region |
| | | PARFSGSGSGTEFTLTISSLQSEDFAVYYCHQYNNWPYTFGQGTKVEIK | | (“LC”) amino acid sequence |
| Ab 135 | 269 | EVQLLESGGGVVQSGRSLRLSCAASGFTFNNYAMHWVRQAPGKGLEWVAVISFD | ADI-14607 | Heavy chain variable region |
| | | GGNKFYGDSVQGRFTISRDNSKNTLYLQTNSLRPEDTAVYYCARDRWEIQIGLDIW | | (“HC”) amino acid sequence |
| | | GQGTTVTVSS | | |
| Ab 135 | 270 | SYVLTQPPSVSVSPGQTARITCSGDALARQNAYWYQQKPGQAPVLVMYRDTGRPS | ADI-14607 | Light chain variable region |
| | | GIPERFSGSSSGTTVTLTISEVQAEDEADYYCQSADSSGAYVFGTGTKVTVL | | (“LC”) amino acid sequence |
| Ab 136 | 271 | EVQLLESGGGLVKPGGSLRLSCAASGFTFSSYSMNWVRQAPGKGLEWVSSISSSSS | ADI-19420 | Heavy chain variable region |
| | | YIYYADSVKGRFTISRDNAKNSLYLQMNSLRAEDTAVYYCARVGWGYSYGYWFDP | | (“HC”) amino acid sequence |
| | | WGQGTLVTVSS | | |
| Ab 136 | 272 | QSVLTQPPSVSGAPGQRVTISCTGSSSNIGAGYDVHWYQQLPGTAPKLLIYGNSNR | ADI-19420 | Light chain variable region |
| | | PSGVPDRFSGSKSGTSASLAITGLQAEDEADYYCQSYDSSLSGVVFGGGTKLTVL | | (“LC”) amino acid sequence |
| Ab 137 | 273 | EVQLLESGGGVVQPGRSLRLSCAASGFTFSSYGMHWVRQAPGKGLEWVAVISYD | ADI-19421 | Heavy chain variable region |
| | | GSNKYYADSVKGRFTISRDNSKNTLYLQMNSLRAEDTAVYYCAKDIHHVLRFLDPDY | | (“HC”) amino acid sequence |
| | | WGQGTLVTVSS | | |
| Ab 137 | 274 | QSVLIQPASVSGFPGQSITISCTGTSSDVGGYNYVSWYQQHPGKAPKLMIYEVSNR | ADI-19421 | Light chain variable region |
| | | PSGVSNRFSGSKSGNTASLTISGLQAEDEADYYCSSYTSSSTLVFGGGTKLTVL | | (“LC”) amino acid sequence |
| Ab 138 | 275 | EVQLVESGGGVVQPGRSLRLSCAASGFTFSSYGMHWVRQAPGKGLEWVAVISYD | ADI-19422 | Heavy chain variable region |
| | | GSNKYYADSVKGRFTISRDNSKNTLYLQMNSLRAEDTAVYYCAKEGYNWNDYYFD | | (“HC”) amino acid sequence |
| | | YWGQGTLVTVSS | | |
| Ab 138 | 276 | QPVLTQPPSVSVAPGKTARITCGGNNIGSKSVHWYQQKPGQAPVLVVYDDSDRPS | ADI-19422 | Light chain variable region |
| | | GIPERFSGSNSGNTATLTISRVEAGDEADYYCQVWDSSSDHWVFGGGTKLTVL | | (“LC”) amino acid sequence |
| Ab 139 | 277 | EVQLLESGGGLVQPGGSLRLSCAASGFTVSSNYMSWVRQAPGKGLEWVSDIYSGG | ADI-19424 | Heavy chain variable region |
| | | RTDYADSVKGRFTISRDNSKNTLDLQMNSLRAEDTAVYYCARETLGMDHWYFDL | | (“HC”) amino acid sequence |
| | | WGRGTLVTVSS | | |
| Ab 139 | 278 | QPGLTQPPSVSVAPGKTARITCGGNNIGSKSVHWYQQKPGQAPVLVVYDDSDRPS | ADI-19424 | Light chain variable region |
| | | GIPERFSGSNSGNTATLTISRVEAGDEADYYCQVWDSTSDHPVFGGGTKLTVL | | (“LC”) amino acid sequence |
| Ab 140 | 279 | EVQLVESGGGLVKPGGSLRLSCAASGFTFSSYSMNWVRQAPGKGLEWVSSISSSSS | ADI-19425 | Heavy chain variable region |
| | | YIYYADSVKGRFTISRDNAKNSLYLQMNSLRAEDTAVYYCARLGYCSGGSCHFDYW | | (“HC”) amino acid sequence |
| | | GQGTLVTVSS | | |
| Ab 140 | 280 | QPVLTQPPSVSGAPGQRVTISCTGSSSNIGAGYDVHWYQQLPGTAPKLLIYGNSNR | ADI-19425 | Light chain variable region |
| | | PSGVPDRFSGSKSGTSASLAITGLQAEDEADYYCQSYDSSLSGFYVFGIGTKLTVL | | (“LC”) amino acid sequence |
| Ab 141 | 281 | QVQLQESGPGLVKPSETLSLTCTVSGGSISSYYWSWIRQPPGKGLEWIGYIYYSGST | ADI-19426 | Heavy chain variable region |
| | | NYNPSLKSRVTISVDTSKNQFSLKLSSVTAADTAVYYCARGNEELGTGSNWFDPWG | | (“HC”) amino acid sequence |
| | | QGTLVTVSS | | |
| Ab 141 | 282 | SYVLTQPPSVSVSPGQTASITCSGDKLGDKYACWYQQKPGQSPVLVIYQDSKRPSGI | ADI-19426 | Light chain variable region |
| | | PERFSGSNSGNTATLTISGTQAMDEADYYCQAWDSSTVVFGGGTKLTVL | | (“LC”) amino acid sequence |
| Ab 142 | 283 | EVQLVESGGGLVKPGGSLRLSCAASGFTFSSYSMNWVRQAPGKGLEWVSSISSSSS | ADI-19427 | Heavy chain variable region |
| | | FISYADSVKGRFTISRDSAKNSLYLQMNSLRAEDTAVYYCARDHPNWNGLAYFDY | | (“HC”) amino acid sequence |
| | | WGQGTLVTVSS | | |
| Ab 142 | 284 | QSVLTQPPSISGAPGQRVTISCTGSSSNIGAGYDVQWHQQLPGTAPKLLIYGNSNR | ADI-19427 | Light chain variable region |
| | | PSGVPDRFSGSKSGTSASLAITGLQAEDEADYYCQSYDSSLSGWVFGGGTKLTVL | | (“LC”) amino acid sequence |
| Ab 143 | 285 | EVQLLESGGGLVKPGGSLRLSCAASGFTFSSYSMNWVRQAPGKGLEWVSSISSSSS | ADI-19428 | Heavy chain variable region |
| | | YIYYADSVKGRFTISRDNAKNSLYLQMNSLRAEDTAVYYCARDSCSGGSCYSPRFDP | | (“HC”) amino acid sequence |
| | | WGQGTLVTVSS | | |
| Ab 143 | 286 | QSVLTQPPSVSGAPGQRVTISCTGSSSNIGAGYDVHWYQQLPGTAPKLLIYGNSNR | ADI-19428 | Light chain variable region |
| | | PSGVPDRFSGSKSGTSASLAITGLQAEDEADYYCQSYDSTVVFGGGTKLTVL | | (“LC”) amino acid sequence |
| Ab 144 | 287 | EVQLQESGPGLVKPSETLSLTCTVSGGSISSSSYYWGWIRQPPGKGLEWIGSIYYSGS | ADI-19429 | Heavy chain variable region |
| | | TYYNPSLKSRVTISVDTSKNQFSLKLSSVTAADTAVYYCARTPLYSYGRVVGFYYYGM | | (“HC”) amino acid sequence |
| | | DVWGQGTTVTVSS | | |
| Ab 144 | 288 | QSVLTQPPSVSGAPGQRVTISCTGSSSNIGAGYDVHWYQQLPGTAPKLLIYGNSNR | ADI-19429 | Light chain variable region |
| | | PSGVPDRFSGSKSGTSASLAITGLQAEDEADYYCQSYDSSLSGWVFGGGTKLTVL | | (“LC”) amino acid sequence |
| Ab 145 | 289 | QVQLVQSGAEVKKPGSSVKVSCKASGGTFSSYTISWVRQAPGQGLEWMGRIIPILG | ADI-19430 | Heavy chain variable region |
| | | IANYAQKFQGRVTITADKSTSTAYMELSSLRSEDTAVYYCARDGGPYYYDSSGYYRL | | (“HC”) amino acid sequence |
| | | DYWGQGTLVTVSS | | |
| Ab 145 | 290 | DIRMTQSPLSLPVTLGQPASISCRSSQSLVYSDGNTYLNWFQQRPGQSPRRLIYKVS | ADI-19430 | Light chain variable region |
| | | NRDSGVPDRFSGSGSGTDFTLKISRVEAEDVGVYYCMQGTHWTYTFGQGTKLEIK | | (“LC”) amino acid sequence |
| Ab 146 | 291 | EVQLVESGGGLVKPGGSLRLSCAASGFTFSSYSMNWVRQAPGKGLEWVSSISSSSS | ADI-19431 | Heavy chain variable region |
| | | YIYYADSVKGRFTISRDNAKNSLYLQMNSLRAEDTAVYYCARELYDYVWGSYRDYW | | (“HC”) amino acid sequence |
| | | GQGTLVTVSS | | |
| Ab 146 | 292 | QPGLTQPPSVSGAPGQRVTISCTGSSSNIGAGYDVHWYQQLPGTAPKLLIYGNSNR | ADI-19431 | Light chain variable region |
| | | PSGVPDRFSGSKSGTSASLAITGLQAEDEADYYCQSYDSSLSGSVFGGGTKVTVL | | (“LC”) amino acid sequence |
| Ab 147 | 293 | QVQLVQSGAEVKKPGASVKVSCKVSGYTLTELSMHWVRQAPGKGLEWMGGFDP | ADI-19432 | Heavy chain variable region |
| | | EDGETIYAQKFQGRVTMTEDTSTDTAYMELSSLRSEDTAVYYCATEREEGGYSGYD | | (“HC”) amino acid sequence |
| | | DAFDIWGQGTMVTVSS | | |
| Ab 147 | 294 | DIRMTQSPSTLSASVGDRVTITCRASQSISSWLAWYQQKPGKAPKLLIYKASSLESG | ADI-19432 | Light chain variable region |
| | | VPSRFSGSGSGTEFTLTISSLQPDDFATYYCQQYNSYSYTFGQGTKLEIK | | (“LC”) amino acid sequence |
| Ab 148 | 295 | EVQLVESGGGLVKPGGSLRLSCAASGFTFSSYSMNWVRQAPGKGLEWVSSISSSSS | ADI-19433 | Heavy chain variable region |
| | | YIYYADSVKGRFTISRDNAKNSLYLQMNSLRAEDTAVYYCARAPPSVGGWYFDLW | | (“HC”) amino acid sequence |
| | | GRGTLVTVSS | | |
| Ab 148 | 296 | QPVLTQPPSVSGAPGQRVTISCTGSSSNIGAGYDVHWYQQLPGTAPKLLIYGNSNR | ADI-19433 | Light chain variable region |
| | | PSGVPDRFSGSKSGTSASLAITGLQAEDEADYYCQSYDSSLVFGGGTKLTVL | | (“LC”) amino acid sequence |
| Ab 149 | 297 | QVQLQESGPGLVKPSQTLSLTCTVSGGSISSGSYYWSWIRQPAGKGLEWIGRIYTSG | ADI-19435 | Heavy chain variable region |
| | | STNYNPSLKSRVTISVDTSKNQFSLKLSSVTAADTAVYYCAREGRGGAFDIWGQGTL | | (“HC”) amino acid sequence |
| | | VTVSS | | |
| Ab 149 | 298 | SYELTQPPSVSVSPGQTARITCSADALPKQYAYWYQQKPGQAPVLVIYKDSERPSGI | ADI-19435 | Light chain variable region |
| | | PERFSGSSSGTTVTLTISGVQAEDEADYYCQSADSSGTYVVFGGGTQLTVL | | (“LC”) amino acid sequence |
| Ab 150 | 299 | QVQLVQSGPGLVKPSETLSLTCTVSGGSISSSSYYWGWIRQPPGKGLEWIGSIYYSG | ADI-19436 | Heavy chain variable region |
| | | STYYNPSLKSRVTISVDTSKNQFSLKLSSVTAADTAVYYCARSLMNYSNYVLGFDPW | | (“HC”) amino acid sequence |
| | | GQGTLVTVSS | | |
| Ab 150 | 300 | QPVLTQPPSVSVSPGQTASITCSGDKLGDKYACWYQQKPGQSPVLVIYQDSKRPSG | ADI-19436 | Light chain variable region |
| | | IPERFSGSNSGNTATLTISGTQAMDEADYYCQAWDSSTVVFGGGTKLTVL | | (“LC”) amino acid sequence |
| Ab 151 | 301 | EVQLVQSGAEVKKPGASVKVSCKASGYTFTSYGISWVRQAPGQGLEWMGWISAY | ADI-19437 | Heavy chain variable region |
| | | NGNTNYAQKLQGRVTMTTDTSTSTAYMELRSLRSDDTAVYYCARDGIAAAGTLFD | | (“HC”) amino acid sequence |
| | | YWGQGTLVTVSS | | |
| Ab 151 | 302 | DIQLTQSPSSVSASVGDRVTITCRASQGISSWLAWYQQKPGKAPKLLIYAASSLQSG | ADI-19437 | Light chain variable region |
| | | VPSRFSGSGSGTDFTLTISSLQPEDFATYYCQQANSFPLTFGGGTKVEIK | | (“LC”) amino acid sequence |
| Ab 152 | 303 | EVQLVESGGGLVQPGGSLRLSCAASGFTFSSYAMSWVRQAPGKGLEWVSAISGSG | ADI-19439 | Heavy chain variable region |
| | | GSTYYADSVKGRFTISRDNSKNTLYLQMNSLRAEDTAVYYCAKYSNYGSFDYWGQ | | (“HC”) amino acid sequence |
| | | GTLVTVSS | | |
| Ab 152 | 304 | DIQMTQSPSTLSASVGDRVTITCRASQSISSWLAWYQQKPGKAPKLLIYKASSLESG | ADI-19439 | Light chain variable region |
| | | VPSRFSGSGSGTEFTLTISSLQPDDFATYYCQQYNSYSTFGQGTKVEIK | | (“LC”) amino acid sequence |
| Ab 153 | 305 | EVQLVESGGGLVQPGGSLRLSCAASGFTFSSYSMNWVRQAPGKGLEWVSYISSSSS | ADI-19440 | Heavy chain variable region |
| | | TIYYADSVKGRFTISRDNAKNSLYLQMNSLRAEDTAVYYCAREGYSGSYGYYFDYW | | (“HC”) amino acid sequence |
| | | GQGTLVTVSS | | |
| Ab 153 | 306 | QSVLTQPPSVSGAPGQRVTISCTGSSSNIGAGYDVHWYQQLPGTAPKLLIYGNSNR | ADI-19440 | Light chain variable region |
| | | PSGVPDRFSGSKSGTSASLAITGLQAEDEADYYCQSYDSSLSGSVFGIGTKLTVL | | (“LC”) amino acid sequence |
| Ab 154 | 307 | QVQLVQSGAEVKKPGSSVKVSCKASGGTFSSYAISWVRQAPGQGLEWMGRIIPILG | ADI-19441 | Heavy chain variable region |
| | | IANYAQKFQGRVTITADKSTSTAYMELSSLRSEDTAVYYCARGPLTGYSSSWFDPW | | (“HC”) amino acid sequence |
| | | GQGTLVTVSS | | |
| Ab 154 | 308 | EIVMTQSPSSLSASVGDRVTITCRASQSISSYLNWYQQKPGKAPKLLIYAASSLQSGV | ADI-19441 | Light chain variable region |
| | | PSRFSGSGSGTDFTLTISSLQPEDFATYYCQQSYSTLPYTFGQGTKVEIK | | (“LC”) amino acid sequence |
| Ab 155 | 309 | QVQLVQSGAEVKKPGASVKVSCKASGYTFTSYGISWVRQAPGQGLEWMGWISAY | ADI-19444 | Heavy chain variable region |
| | | NGNTNYAQKLQGRVTMTTDTSTSTAYMELRSLRSDDTAVYYCARDEALVGATFDY | | (“HC”) amino acid sequence |
| | | WGQGTLVTVSS | | |
| Ab 155 | 310 | DIVMTQSPDSLAVSLGERATINCKSSQSVLYSSNNKNYLAWYQQKPGQPPKLLIYW | ADI-19444 | Light chain variable region |
| | | ASTRESGVPDRFSGSGSGTDFTLTISSLQAEDVAVYYCQQYYSTPRTFGQGTKVEIK | | (“LC”) amino acid sequence |
| Ab 156 | 311 | EVQLVESGPGLVKPSGTLSLTCAVSGGSISSSNWWSWVRQPPGKGLEWIGEIYHSG | ADI-19445 | Heavy chain variable region |
| | | STNYNPSLKSRVTISVDKSKNQFSLKLSSVTAADTAVYYCARDVETDGYNYGYYFDY | | (“HC”) amino acid sequence |
| | | WGQGTLVTVSS | | |
| Ab 156 | 312 | SYELIQPPSVSVAPGKTARITCGGNNIGSKSVHWYQQKPGQAPVLVVYDDSDRPSG | ADI-19445 | Light chain variable region |
| | | IPGRFSGSNSGNTATLTISRVEAGDEADYYCQVWDSSSDHKVFGGGTKLTVL | | (“LC”) amino acid sequence |
| Ab 157 | 313 | QVQLQESGPGLVKPSETLSLICTVSGGSISSSSYYWGWIRQPPGKGLEWIGSIYYSG | ADI-19447 | Heavy chain variable region |
| | | STYYNPSLKSRVTISVDTSKNQFSLKLSSVTAADTAVYYCARDRVVTTYFDYWGQGT | | (“HC”) amino acid sequence |
| | | LVTVSS | | |
| Ab 157 | 314 | SYELTQPPSVSVSPGQTARITCSGDALPKKYAYWYQQKSGQAPVLVIYEDSKRPSGI | ADI-19447 | Light chain variable region |
| | | PERFSGSSSGTMATLTISGAQVEDEADYYCYSTDSSGNHRVFGGGTKLTVL | | (“LC”) amino acid sequence |
| Ab 158 | 315 | EVQLLESGGGLVKPGGSLRLSCAASGFTFSSYSMNWVRQAPGKGLEWVSSISSSSS | ADI-19448 | Heavy chain variable region |
| | | YIYYADSVKGRFTISRDNAKNSLYLQMNSLRAEDTAVYYCARELLDPGIAAAGFDYW | | (“HC”) amino acid sequence |
| | | GQGTLVTVSS | | |
| Ab 158 | 316 | QSVLTQPPSVSGAPGQRVTISCTGSSSNIGAGYDVHWYQQLPGTAPKLLIYGNSNR | ADI-19448 | Light chain variable region |
| | | PSGVPDRFSGSKSGTSASLAITGLQAEDEADYYCQSYDSSLSVNYVFGTGTKVTVL | | (“LC”) amino acid sequence |
| Ab 159 | 317 | EVQLVESGGGLVKPGGSLRLSCAASGFTFSSYSMNWVRQAPGKGLEWVSSISSSSS | ADI-19449 | Heavy chain variable region |
| | | YIYYADSVKGRFTISRDNAKNSLYLQMNSLRAEDTAVYYCARDSGSYLSYAFDIWGQ | | (“HC”) amino acid sequence |
| | | GTMVTVSS | | |
| Ab 159 | 318 | SYELTQPPSVSGAPGQRVTISCTGSSSNIGAGYDVHWYQQLPGTAPKLLIYGNSNRP | ADI-19449 | Light chain variable region |
| | | SGVPDRFSGSKSGTSASLAITGLQAEDEADYYCQSYDSSLSGYVFGTGTKVTVL | | (“LC”) amino acid sequence |
| Ab 160 | 319 | EVQLLESGGGLVQPGGSLRLSCAASGFTFSSYWMHWVRQAPGKGLVWVSRINSD | ADI-19450 | Heavy chain variable region |
| | | GSSTSYADSVKGRFTISRDNAKNTLYLQMNSLRAEDTAVYYCARAPISILRFLGGYFD | | (“HC”) amino acid sequence |
| | | YWGQGTLVTVSS | | |
| Ab 160 | 320 | EIVMTQSPSTLSASVGDRVTITCRASQSISSWLAWYQQKPGKAPKLLIYKASSLESGV | ADI-19450 | Light chain variable region |
| | | PSRFSGSGSGTEFTLTISSLQPDDFATYYCQQYNSYSSFGQGTKLEIK | | (“LC”) amino acid sequence |
| Ab 161 | 321 | EVQLLESGGGLVKPGGSLRLSCAASGFTFSSYSMNWVRQAPGKGLEWVSSISSSSS | ADI-19454 | Heavy chain variable region |
| | | YIYYADSVKGRFTISRDNAKNSLYLQMNSLRAEDTAVYYCARGYCSGGSCYSHYFQH | | (“HC”) amino acid sequence |
| | | WGQGTLVTVSS | | |
| Ab 161 | 322 | QSVLTQPASVSGSPGQSITISCTGTSSDVGGYNYVSWYQQHPGKAPKLMIYDVSNR | ADI-19454 | Light chain variable region |
| | | PSGVSNRFSGSKSGNTASLTISGLQAEDEADYYCSSYTSSSTVVFGGGTKVTVL | | (“LC”) amino acid sequence |
| Ab 162 | 323 | EVQLVESGGGLVKPGGSLRLSCAASGFTFSSYSMNWVRQAPGKGLEWVSSISSSSS | ADI-19455 | Heavy chain variable region |
| | | YIYYADSVKGRFTISRDNAKNSLYLQMNSLRAEDTAVYYCARSQSGSYYSSDYWGQ | | (“HC”) amino acid sequence |
| | | GTLVTVSS | | |
| Ab 162 | 324 | QSVLTQPPSVSGAPGQRVTISCTGSSSNIGAGYDVHWYQQLPGTAPKLLIYGNSNR | ADI-19455 | Light chain variable region |
| | | PSGVPDRFSGSKSGTSASLAITGLQAEDEADYYCQSYDSSLSGWVFGGGTKVTVL | | (“LC”) amino acid sequence |
| Ab 163 | 325 | EVQLLESGGGLVKPGGSLRLSCAASGFTFSSYSMNWVRQAPGKGLEWVSSISSSSS | ADI-19457 | Heavy chain variable region |
| | | YIYYADSVKGRFTISRDNAKNSLYLQMNSLRAEDTAVYYCARQGYCSGGSCYHIDY | | (“HC”) amino acid sequence |
| | | WGQGTLVTVSS | | |
| Ab 163 | 326 | QSVVTQPPSVSGAPGQRVTISCTGSSSNIGAGYDVHWYQQLPGTAPKLLIYGNSNR | ADI-19457 | Light chain variable region |
| | | PSGVPDRFSGSKSGTSASLAITGLQAEDEADYYCQSYDSSLSGWVFGGGTKLTVL | | (“LC”) amino acid sequence |
| Ab 164 | 327 | EVQLVESGGGRVKPGGSLRLSCAASGFTFRSYSMNWVRQAPGKGLEWVSSISSSSS | ADI-19458 | Heavy chain variable region |
| | | YINYADSVKGRFTISRDNAKNSLYLQMNSLRAEDTAVYYCARDGSGMTIFGVVIDY | | (“HC”) amino acid sequence |
| | | WGQGTLVTVSS | | |
| Ab 164 | 328 | QSVLTQPPSVSGAPGQRVTISCTGSSSNIGAGYDVHWYQQLPGTAPKLLIYGNSNR | ADI-19458 | Light chain variable region |
| | | PSGVPDRFSGSKSGTSASLAITGLQAEDEADYYCQSYDRSLTVVFGGGTKLTVL | | (“LC”) amino acid sequence |
| Ab 165 | 329 | QVQLVESGGGLVQPGGSLRLSCAASGFTVSSNYMSWVRQAPGKGLEWVSVIYSG | ADI-19459 | Heavy chain variable region |
| | | GSTYYADSVKGRFTISRDNSKNTLYLQMNSLRAEDTAVYYCAREALGMDHWYFDL | | (“HC”) amino acid sequence |
| | | WGRGTLVTVSS | | |
| Ab 165 | 330 | SYELMQPPSVSVAPGKTARITCGGNNIGSKSVHWYQQKPGQAPVLVVYDDSDRPS | ADI-19459 | Light chain variable region |
| | | GIPERFSGSNSGNTATLTISRVEAGDEADYYCQVWDSSSDHPVFGGGTKVTVL | | (“LC”) amino acid sequence |
| Ab 166 | 331 | QVQLQQWGAGLLKPSETLSLTCAVYGGSFSGYYWSWIRQPPGKGLEWIGEINHSG | ADI-19460 | Heavy chain variable region |
| | | STNYNPSLKSRVTISVDTSKNQFSLKLSSVTAADTAVYYCARGGITAYYYYYGMDVW | | (“HC”) amino acid sequence |
| | | GQGTTVTVSS | | |
| Ab 166 | 332 | DIQMTQSPSSLSASVGDRVTITCRASQSISSYLNWYQQKPGKAPKLLIYAASSLQSG | ADI-19460 | Light chain variable region |
| | | VPSRFSGSGSGTDFTLTISSLQPEDFATYYCQQSYSTPYTFGQGTKVEIK | | (“LC”) amino acid sequence |
| Ab 167 | 333 | EVQLVESGGGLVKPGGSLRLSCAASGFTFSDYYMSWIRQAPGKGLEWVSYISSSGS | ADI-19461 | Heavy chain variable region |
| | | TIYYADSVKGRFTISRDNAKNSLYLQMNSLRAEDTAVYYCASSLTVTSRSDAFDIWG | | (“HC”) amino acid sequence |
| | | QGTMVTVSS | | |
| Ab 167 | 334 | QPGLTQLPSVSVAPGKTARITCGGNNIGSKSVHWYQQKPGQAPVLVVYDDSDRPS | ADI-19461 | Light chain variable region |
| | | GIPERFSGSNSGNTATLTISRVEAGDEADYYCQVWDSSSDHVVFGGGTKLTVL | | (“LC”) amino acid sequence |
| Ab 168 | 335 | QITLKESGPTLVKPTQTLTLTCTFSGFSLSTSGVGVGWIRQPPGKALEWLALIYWDD | ADI-19462 | Heavy chain variable region |
| | | DKRYSPSLKSRLTITKDTSKNQVVLTMTNMDPVDTATYYCAHAANWGYYFDYWG | | (“HC”) amino acid sequence |
| | | QGTLVTVSS | | |
| Ab 168 | 336 | DIVMTQSPSTLSASVGDRVTITCRASQSISSWLAWYQQKPGKAPKLLIYKASSLESG | ADI-19462 | Light chain variable region |
| | | VPSRFSGSGSGTEFTLTISSLQPDDFATYYCQQYNSYWTFGQGTKVEIK | | (“LC”) amino acid sequence |
| Ab 169 | 337 | QVQLQESGPGLVKPSQTLSLTCTVSGGSISSGDYYWSWIRQPPGKGLEWIGYIYYSG | ADI-19463 | Heavy chain variable region |
| | | STYYNPSLKSRVTISVDTSKNQFSLKLSSVTAADTAVYYCARDRLGIFDYWGQGTLVT | | (“HC”) amino acid sequence |
| | | VSS | | |
| Ab 169 | 338 | EIVLTQSPDSLAVSLGERATINCKSSQSVLYSSNNKNYLAWYQQKPGQPPKLLIYWA | ADI-19463 | Light chain variable region |
| | | STRESGVPDRFSGSGSGTDFTLTISSLQAEDVAVYYCQQYYSTPWTFGQGTKVEIK | | (“LC”) amino acid sequence |
| Ab 170 | 339 | EVQLVESGGGLVKPGGSLRLSCAASGFTFSSYSMNWVRQAPGKGLEWVSSISSSSS | ADI-19465 | Heavy chain variable region |
| | | YIYYADSVKGRFTISRDNAKNSLYLQMNSLRAEDTAVYYCAREGSSSWYYFDYWGQ | | (“HC”) amino acid sequence |
| | | GTLVTVSS | | |
| Ab 170 | 340 | QSVVTQPPSVSGAPGQRVTISCTGSSSNIGAGYDVHWYQQLPGTAPKLLIYGNSNR | ADI-19465 | Light chain variable region |
| | | PSGVPDRFSGSKSGTSASLAITGLQAEDEADYYCQSYDSSLSGPWVFGGGTKLTVL | | (“LC”) amino acid sequence |
| Ab 171 | 341 | EVQLVESGGGLVKPGGSLRLSCAASGFTFSSYSMNWVRQAPGKGLEWVSSISSSSS | ADI-19467 | Heavy chain variable region |
| | | YIYYADSVKGRFTISRDNAKNSLYLQMNSLRAEDTAVYYCASLSSSSELGYYFDYWG | | (“HC”) amino acid sequence |
| | | QGTLVTVSS | | |
| Ab 171 | 342 | QPVLTQPPSVSGAPGQRVTISCTGSSSNIGAGYDVHWYQQLPGTAPKLLIYGNSNR | ADI-19467 | Light chain variable region |
| | | PSGVPDRFSGSKSGTSASLAITGLQAEDEADYYCQSYDSSLSGYVFGTGTKLTVL | | (“LC”) amino acid sequence |
| Ab 172 | 343 | EVQLVESGPGLVKPSETLSLICTVSGGSISSSSYYWGWIRQPPGKGLEWIGSIYYSGS | ADI-19468 | Heavy chain variable region |
| | | TYYNPSLKSRVTISVDTSKNQFSLKLSSVTAADTAVYYCARRDGYNYGWFDPWGQG | | (“HC”) amino acid sequence |
| | | TLVTVSS | | |
| Ab 172 | 344 | NFMLTQPHSVSESPGKTVTISCTGSSGSIASNYVQWYQQRPGSAPTTVIYEDNQRP | ADI-19468 | Light chain variable region |
| | | SGVPDRFSGSIDSSSNSASLTISGLKTEDEADYYCQSYDSSNVVFGGGTKVTVL | | (“LC”) amino acid sequence |
| Ab 173 | 345 | QVQLQESGPGLVKPSETLSLTCAVSGYSISSGYYWGWIRQPPGKGLEWIGSIYHSGS | ADI-19469 | Heavy chain variable region |
| | | TYYNPSLKSRVTISVDTSKNQFSLKLSSVTAADTAVYYCARWTVMYYFDYWGQGTL | | (“HC”) amino acid sequence |
| | | VTVSS | | |
| Ab 173 | 346 | EIVMTQSPATLSLSPGERATLSCRASQSVSSYLAWYQQKPGQAPRLLIYDASNRATG | ADI-19469 | Light chain variable region |
| | | IPARFSGSGSGTDFTLTISSLEPEDFAVYYCQQRSNWPTFGGGTKLEIK | | (“LC”) amino acid sequence |
| Ab 174 | 347 | EVQLLESGGGVVQPGRSLRLSCAASGFTFSSYGMHWVRQAPGKGLEWVAVISYD | ADI-19470 | Heavy chain variable region |
| | | GSNKYYADSVKGRFTISRDNSKNTLYLQMNSLRAEDTAVYYCAKGRGDFWSGYGM | | (“HC”) amino acid sequence |
| | | DVWGQGTTVTVSS | | |
| Ab 174 | 348 | SYELTQPPSVSVSPGQTASITCSGDKLGDKYACWYQQKPGQSPVLVIYQDSKRPSGI | ADI-19470 | Light chain variable region |
| | | PERFSGSNSGNTATLTISGTQAMDEADYYCQAWDSSTAVFGGGTKVTVL | | (“LC”) amino acid sequence |
| Ab 175 | 349 | EVQLVESGGGLVQPGGSLRLSCSASGFTFSSYAMHWVRQAPGKGLEYVSAISSNG | ADI-19471 | Heavy chain variable region |
| | | GSTYYADSVKGRFTISRDNSKNTLYLQMSSLRAEDTAVYYCVKADQGSSGWFPDY | | (“HC”) amino acid sequence |
| | | WGQGTLVTVSS | | |
| Ab 175 | 350 | NFMLTQPHSVSESPGKTVTISCTRSSGSIASNYVQWYQQRPGSSPTTVIYEDNQRPS | ADI-19471 | Light chain variable region |
| | | GVPDRFSGSIDSSSNSASLTISGLKTEDEADYYCQSYDSSNWVFGGGTKLTVL | | (“LC”) amino acid sequence |
| Ab 176 | 351 | EVQLVESGAEVKKPGESLKISCKGSGYSFTSYWIGWVRQMPGKGLEWMGIIYPGD | ADI-19473 | Heavy chain variable region |
| | | SDTRYSPSFQGQVTISADKSISTAYLQWSSLKASDTAMYYCARLIAAAGIDYWGQG | | (“HC”) amino acid sequence |
| | | TLVTVSS | | |
| Ab 176 | 352 | NFMLTQPHSVSESPGKTVTISCTRSSGSIASNYVQWYQQRPGSSPTTVIYEDNQRPS | ADI-19473 | Light chain variable region |
| | | GVPDRFSGSIDSSSNSASLTISGLKTEDEADYYCQSYDSSNIWVFGGGTKVTVL | | (“LC”) amino acid sequence |
| Ab 177 | 353 | QVQLVQSGAEVKKPGESLKISCKGSGYSFTSYWIGWVRQMPGKGLEWMGIIYPGD | ADI-19474 | Heavy chain variable region |
| | | SDTRYSPSFQGQVTISADKSISTAYLQWSSLKASDTAMYYCARPYSGSYYAFDIWGQ | | (“HC”) amino acid sequence |
| | | GTTVTVSS | | |
| Ab 177 | 354 | NFMLTQPHSVSESPGKTVTISCTRSSGSIASNYVQWYQQRPGSSPTTVIYEDNQRPS | ADI-19474 | Light chain variable region |
| | | GVPDRFSGSIDSSSNSASLTISGLKTEDEADYYCQSYDSSNQVFGGGTKLTVL | | (“LC”) amino acid sequence |
| Ab 178 | 355 | EVQLLESGAEVKKPGASVKVTCKASGYTFTHFGINWVRQAPGQGLEWLGWISAYN | ADI-19475 | Heavy chain variable region |
| | | GNTNYVQKIQGRVTMTTDTSTNTAYMELRSLRSDDTAVYYCARGPPVEAAGTFDY | | (“HC”) amino acid sequence |
| | | WGQGTLVTVSS | | |
| Ab 178 | 356 | DIVLTQSPLSLPVTLGQPASISCRSSQSLVYSDGNTYLTWFQQRPGQSPRRLIYKVSN | ADI-19475 | Light chain variable region |
| | | RDSGVPDRFSGSGSGTDFTLQISRVEAEDVGVYYCMQGTHWPFTFGPGTKVEIK | | (“LC”) amino acid sequence |
| Ab 179 | 357 | QVQLVESGPTLVKPTQTLTLTCTFSGFSLSTSRVGVGWIRQPPGKALEWLALIYWD | ADI-19476 | Heavy chain variable region |
| | | DDKRYSPSLKSRLTITKDTSKNQVVLTMTNMDPVDTARYYCAHRSTYDILGGYYYFD | | (“HC”) amino acid sequence |
| | | YWGQGTLVTVSS | | |
| Ab 179 | 358 | QPVLTQPRSVSGSPGQSVTISCTGTSSDVGGYNYVSWFQQHPGKAPKLMIYDVSK | ADI-19476 | Light chain variable region |
| | | RPSGVPNRFSGSKSGNTASLTISGLQAEDEADYFCCSYAGTYEVFGGGTKLTVL | | (“LC”) amino acid sequence |
| Ab 180 | 359 | QVQLVESGPGVVKPSETLSLICTVSGGPVSSRSYYWGWIRQPPGKGLEWIGSIYYS | ADI-19478 | Heavy chain variable region |
| | | GSTYYNTSLKSRVTISVDTSKNQFSLKLSSVTAADTAVYYCAKLQYSTSGFDYWGQG | | (“HC”) amino acid sequence |
| | | TLVTVSS | | |
| Ab 180 | 360 | QPVLTQPPSVSEAPRQRVTISCSGSSSNIGNNAVSWYQQLPGKAPKLLIYYDDLVPS | ADI-19478 | Light chain variable region |
| | | GVSDRFSGSKSGTSASLAISGLQSEDEADYYCAAWDDSLNGVVFGGGTKLTVL | | (“LC”) amino acid sequence |
| Ab 181 | 361 | QVQLVQSGAEVKKPGSSVKVSCKASGGTFSSNAINWVRQAPGQGLEWMGGIIPIF | ADI-19479 | Heavy chain variable region |
| | | GTANYAQKFQGRVTITTDESTSTAYMELSSLRSEDTAVYYCATTFYYGSGADYWGQ | | (“HC”) amino acid sequence |
| | | GTLVTVSS | | |
| Ab 181 | 362 | DIQMTQSPLSLPVTLGQPASISCRSSQSLVYSDGNMYLSWFQQRPGQSPRRLIYKVS | ADI-19479 | Light chain variable region |
| | | NRDSGVPDRFSGSGSGTDFTLKISRVEAEDVGVYYCMQGTHWWTFGQGTKVEIK | | (“LC”) amino acid sequence |
| Ab 182 | 363 | EVQLVESGGGLVKPGGSLRLSCAASGFTFSAYSMNWVRQAPGKGLEWVSSISSTT | ADI-19480 | Heavy chain variable region |
| | | NYISYADSVKGRFTISRDNAKNSLYLQMNSLRAEDTAVYYCARDPKYYGLGTYYKDD | | (“HC”) amino acid sequence |
| | | YWGQGTLVTVSS | | |
| Ab 182 | 364 | NFMLTQPHSVSESPGKTVTISCTRSGGSIASNYVQWYQQRPGSSPTTVIYEDNQRP | ADI-19480 | Light chain variable region |
| | | SGVPDRFSGSIDSSFNSASLTVSGLKTEDEADYYCQSFDNNNRWVFGGGTKLTVL | | (“LC”) amino acid sequence |
| Ab 183 | 365 | EVQLVESGGVVVQPGGSLRLSCAASGFTFDDYTMHWVRQAPGKGLEWVSLISWD | ADI-19481 | Heavy chain variable region |
| | | GGITYYADSVKGRFTISRDNSKNSLYLQMNSLRTEDTALYYCVKGGYYDGSGYYYFD | | (“HC”) amino acid sequence |
| | | YWGQGTLVTVSS | | |
| Ab 183 | 366 | DIQMTQSPSSLSASVGDRVTVTCRASQSISSYLNWYQHKPGNAPKLLIYAASSLQSG | ADI-19481 | Light chain variable region |
| | | VPSRFSGSGSGTDFTLTISSLQPEDFATYYCQQSYSTPYTFGQGTKVEIK | | (“LC”) amino acid sequence |
| Ab 184 | 367 | QVQLQQWGAGLLKPSETLSLTCGAFHGSFSGYYWSWIRQPPGKGLEWIGEVTHSR | ADI-19482 | Heavy chain variable region |
| | | STNYNPSLKSRITISVDTSRNQFSLKLNSVTAADTAVYYCARGSGEWYFDIWGRGTL | | (“HC”) amino acid sequence |
| | | VTVSS | | |
| Ab 184 | 368 | DIQLTQSPSTLSASVGDRVTITCRASQSISSWLAWYQQKPGRAPKLLIYKASSLESGV | ADI-19482 | Light chain variable region |
| | | PSRFSGSGSGTEFTLTISSLQPDDFATYYCQQYNSYSPEIFGQGTKVEIK | | (“LC”) amino acid sequence |
| Ab 185 | 369 | QVQLVQSGAEVKKPGESLKISCKGSGYSFTTYWIGWVRQMPGKGLEWMGIIFPGD | ADI-19483 | Heavy chain variable region |
| | | SDTRYSPSFQGQVTISADKSISTAYLQWSSLKASDTAMYFCARSAFPFGFDIWGQG | | (“HC”) amino acid sequence |
| | | TMVTVSS | | |
| Ab 185 | 370 | SYVLTQPHSVSESPGKTVTISCTRSSGSIASNYVQWYQQRPGSSPTTVIYEDHQRPS | ADI-19483 | Light chain variable region |
| | | GVPDRFSGSIDSSSNSASLTISGLQTEDEADYYCQSYGSGNPWVFGGGTKVTVL | | (“LC”) amino acid sequence |
| Ab 186 | 371 | QVQLQESGSGLVKPSQTLSLTCVVSGGSISSGGNSWSWIRQPPGKGLEWIGYIYDS | ADI-19484 | Heavy chain variable region |
| | | GNTYYNPSLKSRVTISVDRSKNQFSLKVSSVTAADTAVYYCARGAETGTTGWYDPW | | (“HC”) amino acid sequence |
| | | GQGTLVTVSS | | |
| Ab 186 | 372 | DIRLTQSPSSLSASVGDRVTITCRASQTISSYLNWYQQKPGKAPRLLIYAASSLQSGV | ADI-19484 | Light chain variable region |
| | | PSRFSGSGSGTDFTLTISSLQPEDFATYYCQQSYGTPRTFGQGTKVEIK | | (“LC”) amino acid sequence |
| Ab 187 | 373 | QVQLQESGPGLVKPSQTLSLSCTVSGGSISSTNYYWTWIRQHPGKGLEWIGFIYNR | ADI-19485 | Heavy chain variable region |
| | | GSTYYNPSLTSRVTISVDTSKNQFSLKLTSVTAADTAVYYCARAPYYYDRNGYYTAFD | | (“HC”) amino acid sequence |
| | | IWGQGTTVTVSS | | |
| Ab 187 | 374 | EIVLTQSPATLSVSPGERATLSCRASQSVSSNLAWYQQKPGQAPRLLIYDASTRATDI | ADI-19485 | Light chain variable region |
| | | PARFSGGGSGTEFTLTISSLQSEDFAVYYCQQYNNWPRTFGLGTKVDIK | | (“LC”) amino acid sequence |
| Ab 188 | 375 | QVQLQESGPGLVKPSETLSLTCSVSGGSLTSYYWSWIRQPPGKGLEWIGYIYYSGST | ADI-19486 | Heavy chain variable region |
| | | NYNPSLKSRLTISVDTSKNQFSLKLSSVTAADTAVYYCARVGGRGVINVFDYWGQG | | (“HC”) amino acid sequence |
| | | TLVTVSS | | |
| Ab 188 | 376 | QPVLTQPASVSGSPGQSITISCTGTSSDVGGYNYVSWYQQHPGKAPKLMIYEVSNR | ADI-19486 | Light chain variable region |
| | | PSGVSNRFSGSKSGNTASLTISGLQAEDEADYYCDSYRSNSASVVFGGGTKLTVL | | (“LC”) amino acid sequence |
| Ab 189 | 377 | QVTLKESGPALVKPTQTLTLTCTFSGLSISTSGMCVSWIRQPPGKALEWLARIDWD | ADI-19487 | Heavy chain variable region |
| | | DDKYYSTSLKTRLTISKDTSKNQVVLTMTNMDPVDTATYYCARINYYDSSGYYVYYF | | (“HC”) amino acid sequence |
| | | DYWGQGTLVTVSS | | |
| Ab 189 | 378 | DIQMTQSPSSLSASVGDRVTITCRASQSISSYLNWYQQKPGKAPKLLIYAASSLQSG | ADI-19487 | Light chain variable region |
| | | VPSRFSGSGSGTDFTLTISSLQPEDFATYYCQQSYSTPPFTFGPGTKVDIK | | (“LC”) amino acid sequence |
| Ab 190 | 379 | QVQLVQSGAEVKKPGASVKVSCKVSGYTLTELSMHWVRQAPGKGLEWMGGFDP | ADI-19488 | Heavy chain variable region |
| | | EDGETIYAQKFQGRVTMTEDTSTDTAYMELSSLRSEDTAVYYCATARFLEWLSGTN | | (“HC”) amino acid sequence |
| | | WFDPWGQGTLVTVSS | | |
| Ab 190 | 380 | DIQLTQSPLSLPVTPGEPASISCRSSQSLLHSNGYNYLDWYLQKPGQSPQLLIYLGSN | ADI-19488 | Light chain variable region |
| | | RASGVPDRFSGSGSGTDFTLKISRVEAEDVGVYYCMQALQTPPTFGGGTKVEIK | | (“LC”) amino acid sequence |
| Ab 191 | 381 | QITLKESGPALVKPTQTLTLTCTFSGFSLSTSGMCVSWIRQPPGKALEWLARIDWDD | ADI-19489 | Heavy chain variable region |
| | | DKYYSTSLKTRLTISKDTSKNQVVLTMTNMDPVDTATYYCARMCWGNYVPIDAFDI | | (“HC”) amino acid sequence |
| | | WGQGTMVTVSS | | |
| Ab 191 | 382 | DIQLTQSPSSLSASVGDRVTITCRASQGIRNDLGWYQQKPGKAPKRLIYAASSLQSG | ADI-19489 | Light chain variable region |
| | | VPSRFSGSGSGTEFTLTISSLQPEDFATYYCLQHNSYPPTFGQGTKVDIK | | (“LC”) amino acid sequence |
| Ab 192 | 383 | EVQLVESGGGLVKPGGSLRLSCAASGFTFSNAWMSWVRQAPGKGLEWVGRIKSK | ADI-19490 | Heavy chain variable region |
| | | TDGGTTDYAAPVKGRFTISRDDSKNTLYLQMNSLKTEDTAVYYCTTDSSSGGMDV | | (“HC”) amino acid sequence |
| | | WGQGTTVTVSS | | |
| Ab 192 | 384 | DIVLTQSPLSLPVTPGEPASISCRSSQSLLHSNGYNYLDWYLQKPGQSPQLLIYLGSN | ADI-19490 | Light chain variable region |
| | | RASGVPDRFSGSGSGTDFTLKISRVEAEDVGVYYCMQALQTPLTFGGGTKVDIK | | (“LC”) amino acid sequence |
| Ab 193 | 385 | QVQLVQSGPTLVKPTQTLTLICTFSGFSLSTSGVGVGWIRQPPGKALEWLALIYWD | ADI-19491 | Heavy chain variable region |
| | | DDKRYSPSLKSRLTITKDTSKNQVVLTMTNMDPVDTATYYCAHRRATTVTTGYFDY | | (“HC”) amino acid sequence |
| | | WGQGTLVTVSS | | |
| Ab 193 | 386 | QSVLTQPPSVSGAPGQRVTISCTGSSSNIGAGYDVHWYQQLPGTAPKLLIYGNSNR | ADI-19491 | Light chain variable region |
| | | PSGVPDRFSGSKSGTSASLAITGLQAEDEADYYCQSYDSSLSGHYVFGTGTKVTVL | | (“LC”) amino acid sequence |
| Ab 194 | 387 | QVQLVQSGAEVKKPGESLKISCKGSGYRFTSYWIGWVRQMPGKGLEWMGIIYPG | ADI-19492 | Heavy chain variable region |
| | | DSDTRYSPSFQGQVTISADKSISTAYLQWSSLKASDTAMYYCARSGSHYAFDLWGQ | | (“HC”) amino acid sequence |
| | | GTMVTVSS | | |
| Ab 194 | 388 | NFMLTQPHSVSESPGKTVTISCTRSSGNIASNYVQWYQQRPGSSPTTVLYEDNQRP | ADI-19492 | Light chain variable region |
| | | SGVPDRFSGSIDSSSNSASLTISGLKTEDEADYYCQSYDSSNPWVFGGGTKLTVL | | (“LC”) amino acid sequence |
| Ab 195 | 389 | QVQLQQWGAGLLKPSETLSLTCAVYGGSFSGYYWSWIRQPPGKGLEWIGEINHSG | ADI-19493 | Heavy chain variable region |
| | | STNYNPSLKSRVTISVDTSKNQFSLKLSSVTAADTAVYYCARLIENTRVGEYYFDYWG | | (“HC”) amino acid sequence |
| | | QGTLVTVSS | | |
| Ab 195 | 390 | SYELTQPPSVSVSPGQTASITCSGDKLGDKYACWYQQKPGQSPVLVIYQDSKRPSGI | ADI-19493 | Light chain variable region |
| | | PERFSGSNSGNTATLTISGTQAMDEADYYCQAWDSSTVVFGGGTQLTVL | | (“LC”) amino acid sequence |
| Ab 196 | 391 | QVQLVQSGAEVKKPGSSVKVSCKASGGTFSSYVISWVRQAPGQGLEWMGGIIPIF | ADI-19494 | Heavy chain variable region |
| | | GTTYYAQKFQDRVTITTDESTSTAYMELSSLRSEDTAVYYCARDLRYRYNAYDGADA | | (“HC”) amino acid sequence |
| | | FDIWGQGTTVTVSS | | |
| Ab 196 | 392 | QSALTQPASVSGSPGQSITISCTGTSSDVGGYNYVSWYQQHPGKAPKLMIFEVSNR | ADI-19494 | Light chain variable region |
| | | PSGVSNRFSGSKSGNTASLTISGLQAEDEADYYCTSYTKSNSVVFGGGTKLTVL | | (“LC”) amino acid sequence |
| Ab 197 | 393 | QVQLQESGPGLVKPSETLSLTCTVSGGSISSYYWSWIRQPPGKGLEWIGYIYTSGST | ADI-19495 | Heavy chain variable region |
| | | NYNPSLKSRVTISVDTSKNQFSLKLSSVTAADTAVYYCARVGSYYDLQHWGQGTLV | | (“HC”) amino acid sequence |
| | | TVSS | | |
| Ab 197 | 394 | DIQLTQSPSSVSASVGDRVTITCRASQGISSWLAWYQQKPGKAPKLLIYAASSLQSG | ADI-19495 | Light chain variable region |
| | | VPSRFSGSGSGTDFTLTISSLQPEDFATYYCQQANSFPLTFGGGTKVEIK | | (“LC”) amino acid sequence |
| Ab 198 | 395 | EVQLVESGGGVVQPGGSLRLSCAASGFTFSSYGMHWVRQAPGKGLEWVAFIRYD | ADI-19496 | Heavy chain variable region |
| | | GSNKYYADSVKGRFTISRDNSKSTLYLQMNSLRAEDTAVYYCAKDATFGYSSSWYN | | (“HC”) amino acid sequence |
| | | FDYWGQGTLVTVSS | | |
| Ab 198 | 396 | DIQMTQSPDSLAVSLGERATINCKSSQSVLFSSNNKNYLAWYQQKPGQPPKLLIYW | ADI-19496 | Light chain variable region |
| | | ASTRESGVPDRFSGSGSGTDFTLTISSLQAEDVAVYYCQQYYSTPTFGQGTKVEIK | | (“LC”) amino acid sequence |
| Ab 199 | 397 | QVQLVQSGAEVKKPGASVKVSCKASGYTFTSYYMHWVRQAPGQGLEWMGIINPS | ADI-19497 | Heavy chain variable region |
| | | GGSTSYAQKFQGRVTMTRDTSTSTVYMELSSLRSEDTAVYYCSRGYSYGYDYWGQ | | (“HC”) amino acid sequence |
| | | GTLVTVSS | | |
| Ab 199 | 398 | NFMLTQPHSVSESPGKTVTISCTRSSGSIASNYVQWYQQRPGSSPTTVIYEDNQRPS | ADI-19497 | Light chain variable region |
| | | GVPDRFSGSIDSSSNSASLTISGLKTEDEADYYCQSYDSSNWVFGGGTKLTVL | | (“LC”) amino acid sequence |
| Ab 200 | 399 | EVQLVESGGGLVQPGGSLRLSCAASGFTVSSNYMSWVRQAPGKGLEWVSVIYSGG | ADI-19498 | Heavy chain variable region |
| | | SAYYADSVKGRFTISRDNSKNTLYLQMNSLRAEDTAVYYCAREARISPPQGAFDIW | | (“HC”) amino acid sequence |
| | | GQGTMVTVSS | | |
| Ab 200 | 400 | SYVLTQPPSVSVSPGQTARITCSGDALPKQYAYWYQQKPGQAPVLVIYKDSERPSGI | ADI-19498 | Light chain variable region |
| | | PERFSGSSSGTTVTLTISGVQAEDEADYYCQSADSSGTLYVFGTGTKVTVL | | (“LC”) amino acid sequence |
| Ab 201 | 401 | EVQLLESGPGLVKPSETLSLTCTVSGGSISSSSYYWGWIRQPPGKGLEWIGSIYYSGS | ADI-19499 | Heavy chain variable region |
| | | TYYNPSLKSRVTISVDTSKNQFSLKLSSVTAADTAVYYCAVLLYSSSSFDYWGQGTLV | | (“HC”) amino acid sequence |
| | | TVSS | | |
| Ab 201 | 402 | NFMLTQPHSVSESPGKTVTISCTRSSGSIASNYVQWYQQRPGSSPTTVIYEDNQRPS | ADI-19499 | Light chain variable region |
| | | GVPDRFSGSIDSSSNSASLTISGLKTEDEADYYCQSYDSSNQAVFGGGTQLTVL | | (“LC”) amino acid sequence |
| Ab 202 | 403 | EVQLVESGGGLVQPGGSLRLSCAASGFTFSSYSMNWVRQAPGKGLEWVSYISSSSS | ADI-19500 | Heavy chain variable region |
| | | TIYYADSVKGRFTISRDNAKNSLYLQMNSLRAEDTAVYYCARGNTVTTFLDYWGQG | | (“HC”) amino acid sequence |
| | | TLVTVSS | | |
| Ab 202 | 404 | DIRLTQSPSSFSASTGDRVTITCRASQGISSYLAWYQQKPGKAPKLLIYAASTLQSGV | ADI-19500 | Light chain variable region |
| | | PSRFSGSGSGTDFTLTISCLQSEDFATYYCQQYYSYPPLTFGGGTKVDIK | | (“LC”) amino acid sequence |
| Ab 203 | 405 | QVQLVQSGAEVKKPGASVKVSCKASGYAFTNYGVSWVRQAPGQGLEWMGWISV | ADI-19501 | Heavy chain variable region |
| | | YNGNTNYAQKLQGRVTMTTDTSTSTAYMELRSLRSDDTALYYCARDPPSEGAAGL | | (“HC”) amino acid sequence |
| | | FDYWGQGTLVTISS | | |
| Ab 203 | 406 | DIVMTQSPLSLPVTLGQPASFSCRSSQSLVYSDGNTYLSWFQQRPGQSPRRLIYKVS | ADI-19501 | Light chain variable region |
| | | NRDSGVPDRFSGSGSGTDFTLKISRVEAEDVGVYYCMQGTHWPCTFGQGTKVEIK | | (“LC”) amino acid sequence |
| Ab 204 | 407 | EVQLVESGGGVVQPGGSLRLSCAASGFTFSSDGMHWVRQAPGKGLEWVAFIQYD | ADI-19502 | Heavy chain variable region |
| | | GTNKYYVDSVKGRFTISRDNSKNTLYLQMNSLRAEDTAVYYCAKDQGFRYSSSWYA | | (“HC”) amino acid sequence |
| | | FDIWGQGTMVTVSS | | |
| Ab 204 | 408 | EIVMTQSPDSLAVSLGERATINCKSSQSVLFNSNNKNYLAWYQQKPGQPPKLLIYW | ADI-19502 | Light chain variable region |
| | | ASTRESGVPDRFSGSGSGTDFTLTISSLQAEDVAVYYCQQYYSTPTFGQGTRLEIK | | (“LC”) amino acid sequence |
| Ab 205 | 409 | QVQLVQSGAEVKKPGASVKVSCKASGYTFTSYYMHWVRQAPGQGLEWMGIINPS | ADI-19503 | Heavy chain variable region |
| | | GGSTSYAQKFQGRVTMTRDTSTSTVYMELSSLRSEDTAVYYCARDSLVNCSGGSCP | | (“HC”) amino acid sequence |
| | | GGPDYWGQGTLVTVSS | | |
| Ab 205 | 410 | SYVLTQPPSVSVSPGQTARITCSGDALPKKYAYWYQQKSGQAPVLVIYEDSKRPSGI | ADI-19503 | Light chain variable region |
| | | PERFSGSSSGTMATLTISGAQVEDEADYYCYSTDSSGNHRVFGGGTKLTVL | | (“LC”) amino acid sequence |
| Ab 206 | 411 | QVQLVQSGAEVKKPGESLKISCKGSGYSFTNYWIGWVRQMPGKGLEWMGITYPG | ADI-19505 | Heavy chain variable region |
| | | DSDTRYSPSFQGQVTISADKSISTAHLQWDSLKASDTAMYYCARLRCTGSICYDAFD | | (“HC”) amino acid sequence |
| | | IWGQGTTVTVSS | | |
| Ab 206 | 412 | SYVLTQPLSVSVALGQTARITCGGNNIGSKNVHWYQQKPGQAPVLVIYRDNNRPS | ADI-19505 | Light chain variable region |
| | | GIPERFSGSNSGNTATLTISRAQAGDEADYYCQVWDSSTGGDVFGAGTKVTVL | | (“LC”) amino acid sequence |
| Ab 207 | 413 | QVQLVQSGAEVKKPGASVKVSCKASGYTFTSYGISWVRQAPGQGLEWMGWISAY | ADI-19506 | Heavy chain variable region |
| | | NGNTNYAQKLQGRVTMTTDTSTSTAYMELRSLRSDDTAVYYCARVRSVGRFGELL | | (“HC”) amino acid sequence |
| | | YYYYGMDVWGQGTTVTVSS | | |
| Ab 207 | 414 | DIRLTQSPLSLPVTPGEPASISCRSSQSLLHSNGYNYLDWYLQKPGQSPQLLIYLGSN | ADI-19506 | Light chain variable region |
| | | RASGVPDRFSGSGSGTDFTLKISRVEAEDVGVYYCMQALQTPWTFGQGTKLEIK | | (“LC”) amino acid sequence |
| Ab 208 | 415 | EVQLVESGGGLVKPGGSLRLSCAASGFTFSSYSMNWVRQAPGKGLEWVSSISSSSS | ADI-19507 | Heavy chain variable region |
| | | YIYYADSVKGRFTISRDNAKNSLYLQMNSLRAEDTAVYYCAREVLTGDYLGWFDPW | | (“HC”) amino acid sequence |
| | | GQGTLVTVSS | | |
| Ab 208 | 416 | QSVVTQPPSVSGAPGQRVTISCTGSSSNIGAGYDVHWYQQLPGTAPKLLIYGNSNR | ADI-19507 | Light chain variable region |
| | | PSGVPDRFSGSKSGTSASLAITGLQAEDEADYYCQSYDSSHWVFGGGTKLTVL | | (“LC”) amino acid sequence |
| Ab 209 | 417 | EVQLVESGGGLVKPGGSLRLSCAASGFTFSSYSMNWVRQAPGKGLEWVSSISSSSS | ADI-19509 | Heavy chain variable region |
| | | YIYYADSVKGRFTISRDNAKNSLYLQMNSLRAEDTAVYYCASSRRSLTGDRGGWFD | | (“HC”) amino acid sequence |
| | | PWGQGTLVTVSS | | |
| Ab 209 | 418 | QSVLTQPPSVSGAPGQRVTISCTGSSSNIGAGYDVHWYQQLPGTAPKLLIYGNSNR | ADI-19509 | Light chain variable region |
| | | PSGVPDRFSGSKSGTSASLAITGLQAEDEADYYCQSYDSSLSGWVFGGGTKLTVL | | (“LC”) amino acid sequence |
| Ab 210 | 419 | EVQLVESGGGLVKPGGSLRLSCAASGFSLSSYYMNWVRQAPGKGLEWVSSISSSST | ADI-19510 | Heavy chain variable region |
| | | YINYADSVKGRFTISRDNAKNSLYLQMNSLRAEDTAVYYCARGGSITIFGVVFDSWG | | (“HC”) amino acid sequence |
| | | QGTLVTVSS | | |
| Ab 210 | 420 | SYELTQPPSVSGAPGQRVTISCTGTSSNIGAGYDVHWYQQLPGTAPKLLIYVNSNRP | ADI-19510 | Light chain variable region |
| | | SGVPDRFSGSKSGTSASLAITGLQAEDEADYYCQSYDSSLSGGVFGTGTKVTVL | | (“LC”) amino acid sequence |
| Ab 211 | 421 | QITLKESGPTLVKPTQTLTLTCTFSGFSLSTSGVGVGWIRQPPGKALEWLALIYWDD | ADI-19511 | Heavy chain variable region |
| | | DKRYSPSLKSRLTITKDTSKNQVVLTMTNMDPVDTATYYCAHSVYYDFWSGYYVPN | | (“HC”) amino acid sequence |
| | | YFDYWGQGTLVTVSS | | |
| Ab 211 | 422 | DIQMTQSPSSLSASVGDRVTITCRASQGIRNDLGWYQQKPGKAPKRLIYAASSLQS | ADI-19511 | Light chain variable region |
| | | GVPSRFSGSGSGTEFTLTISSLQPEDFATYYCLQHNSYPLTFGGGTKVEIK | | (“LC”) amino acid sequence |
| Ab 212 | 423 | EVQLLESGAEVKKPGASVKVSCKTSGYTFSNYGVSWVRQAPGQGLEWLGWISAYN | ADI-20959 | Heavy chain variable region |
| | | GNTNYAQKLQGRVTMTTDSSTSTAYMEVRSLRSDDTAVYYCARDVAPVAASLFDY | | (“HC”) amino acid sequence |
| | | WGQGTLVTVSS | | |
| Ab 212 | 424 | DIRLTQSPLSLPVTLGQPASISCRSSQSLEFTDGNTYLSWFQQRPGQSPRRLIYKVSN | ADI-20959 | Light chain variable region |
| | | RDSGVPDRFSGSGSGTDFTLKINRVEAEDVGVYYCMQGIHWPPTFGPGTKVEIK | | (“LC”) amino acid sequence |
| Ab 213 | 425 | QVQLQQWGAGVLKPSETLSLTCAVNGRSLSGHYWSWIRQTPGKGLEWIGEINNS | ADI-20960 | Heavy chain variable region |
| | | GGTHYSPSLKSRVIISGDTAKNQLSLKLSSVTAADTAVYYCAKGSAEWYFDLWGRGT | | (“HC”) amino acid sequence |
| | | LVTVSS | | |
| Ab 213 | 426 | DIRVTQSPSTLSASVGDRVTITCRASQSVSTWLAWYQQKPGKPPSLLIFKASTLESGV | ADI-20960 | Light chain variable region |
| | | PSRFSGSGSGTEFTLTISSLQPDDFATYYCQQYNTYSPWTFGPGTKVEIK | | (“LC”) amino acid sequence |
| Ab 214 | 427 | QVQLVESGGGLVKPGGSLRLSCAASGFKFSSYYMHWVRQAPGKGLEWVSSVSGG | ADI-20961 | Heavy chain variable region |
| | | STYTSYADSVKGRFTISRDNAKHSLFLQLNSLRAEDTAVYHCVRGDYHPSGTSLNWF | | (“HC”) amino acid sequence |
| | | DPWGQGTLVTVSS | | |
| Ab 214 | 428 | QPGLTQPPSVSGAPGQRVTISCTGSSSNIGAGYDVHWYKQLPGTVPKLLIYANNNR | ADI-20961 | Light chain variable region |
| | | PSGVPDRFSGSESGTSASLAITGLQAEDEADYYCQSYDSSLNAYVFGTGTKVTVL | | (“LC”) amino acid sequence |
| Ab 215 | 429 | QVQLVQSGAEVKKPGASVKVSCKASGYTFSHYGLSWVRQAPGQGLEWMGWISA | ADI-20962 | Heavy chain variable region |
| | | YNHNTNYAQKFQGRVTITTDTSTSTAYLEMRSLRSDDTAVYYCAREPPSDTAAGTG | | (“HC”) amino acid sequence |
| | | DYWGQGTLVTVSS | | |
| Ab 215 | 430 | DIVMTQSPLSLSVTLGQPASISCRSSQSLVYSDGNTYLTWFQQRPGQSPRRLIYKVS | ADI-20962 | Light chain variable region |
| | | NRDSGVPDRFSGSGSGTDFTLKISRVEAEDVGVYYCMQGTQWPRTFGQGTKVDIK | | (“LC”) amino acid sequence |
| Ab 216 | 431 | EVQLVESGGGLAKPGGSLRLSCAASGFTFSHYNMNWVRQAPGKGLEWVSSISSTG | ADI-20963 | Heavy chain variable region |
| | | FHIYYADSVKGRFVISRDNAENSLHLQMNSLRADDTGLYYCVRAEYYYGSGSAGHY | | (“HC”) amino acid sequence |
| | | FDSWGQGTLVTVSS | | |
| Ab 216 | 432 | SYVLTQPPSVSVAPGHTAKITCGGSIIGTKSVHWYQQKPGQAPVLVVYDDSDRPSGI | ADI-20963 | Light chain variable region |
| | | PERLSGSRSGNTATLTITRVEAGDEADYYCQVWDSSSEHAGVFGGGTKLTVL | | (“LC”) amino acid sequence |
| Ab 217 | 433 | QVQLVQSGAEVKKPGASVKVSCKASGYTFTHYGISWVRQAPGQGLEWMGWISAY | ADI-20964 | Heavy chain variable region |
| | | NGNTNYAQKLQGRVTMTTDTSTSTAYMEVRSLRYDDTAVYYCARDVPVEAATSPE | | (“HC”) amino acid sequence |
| | | FWGQGTLVTVSS | | |
| Ab 217 | 434 | DIVMTQTPLSLPVTLGQPASISCRSSQSLVYSDGNTYLSWFQQRPGQSPRRLIYKVS | ADI-20964 | Light chain variable region |
| | | NRDSGVPNRFSGSGSGTDFTLKISRVEAEDVGVYYCVQNTHWPAYTFGQGTKVEIK | | (“LC”) amino acid sequence |
| Ab 218 | 435 | QVQLVQSGAEVKKPGASVKVSCKASGYNFTNYGISWVRQAPGQGLEWMGWIST | ADI-20965 | Heavy chain variable region |
| | | SNGNTHYAQKSQGRITLTTDTSTNTAYMEVRSLRSDDTAVYYCAREGPESTYDWY | | (“HC”) amino acid sequence |
| | | HFDSWGQGTLVTVSS | | |
| Ab 218 | 436 | QSVVTQPPSVSVAPGQTAKITCGGNNIGSKTVHWYQLKAGQAPVLVVYDDSDRPS | ADI-20965 | Light chain variable region |
| | | GIPERFSGSNSGNTATLTIRRVEAGDEADYFCQVWESASDHWVFGGGTKLTVL | | (“LC”) amino acid sequence |
| Ab 219 | 437 | EVQLLESGGGLGKPGGSLRLSCAASGFKLSSYYMHWVRQAPGKGPEWVSSISASSS | ADI-20966 | Heavy chain variable region |
| | | YINYADSVRGRFTVSRDNAKNSLFLQMNSLRVDDTAIYYCARGAPLTNFGMVLDS | | (“HC”) amino acid sequence |
| | | WGQGTLVTVSS | | |
| Ab 219 | 438 | QSVLTQPPSVSGAPGQRVTISCTGSGSNIGAGYDVHWYQQVPGRVPKLLIYANNN | ADI-20966 | Light chain variable region |
| | | RPSGVPDRFSGSKSGTSASLAITGLQADDEADYYCQSYDRSLNVVFGGGTKLTVL | | (“LC”) amino acid sequence |
| Ab 220 | 439 | EVQLLESGGGVVQPGRSVRLSCAASGFSFSSYALHWVRQAPGKGLEWVGVIWYEE | ADI-20967 | Heavy chain variable region |
| | | SNKYYADPVKGRFTISRDNSKNTLYLQMNSLRDEDTAVYYCARKGVATAGLDYWG | | (“HC”) amino acid sequence |
| | | QGTLVTVSS | | |
| Ab 220 | 440 | EIVLTQSPLSLPVTPGEPASISCRSSQSLLNSNGYNYLDWYLQKPGQSPQLLIYLGSNR | ADI-20967 | Light chain variable region |
| | | ASGVPDRFSGSGSGTDFTLKISRVEAEDVGVYYCMQALQTPQTFGPGTKVDIK | | (“LC”) amino acid sequence |
| Ab 221 | 441 | QVQLQQWGAGLLKPSETLSLTCAMYGGSFSDDYWSWIRQPPGKGLEWIGEVNH | ADI-20968 | Heavy chain variable region |
| | | GGSTNYNTSLKSRVTISADTSKKQFSLKLRSVTAADTAVYFCARGWRYCNATTCYSK | | (“HC”) amino acid sequence |
| | | AFDIWGQGTMVTVSS | | |
| Ab 221 | 442 | DIQMTQSPSSLSASVGDRVTITCQASQDIDIYLIWYQQKPGRAPKLLIYDASNLKTGV | ADI-20968 | Light chain variable region |
| | | PSRFSGSGSGTEFTFTINNLQPEDFATYYCQQFHDLPLTFGGGTKLEIK | | (“LC”) amino acid sequence |
| Ab 222 | 443 | EVQLVESGGGLVKPGGSLRLSCAASGFKFSSYTMNWVRQAPGKGLEWVSSVSASS | ADI-20969 | Heavy chain variable region |
| | | SYIFYADSVQGRFIISRDNAQNSLYLQMNSLRADDTAVYYCARDQYGPGHYYNPA | | (“HC”) amino acid sequence |
| | | WFDPWGQGTLVTVSS | | |
| Ab 222 | 444 | QPVLTQPPSVSGAPGQRVTISCTGTSSNIGAGYDVHWYKQLPGTAPKVLIYGNTNR | ADI-20969 | Light chain variable region |
| | | PSGIPDRFSGSKSGTSASLAITGLKAEDEADYYCQSYDRSGSKVFGTGTKLTVL | | (“LC”) amino acid sequence |
| Ab 223 | 445 | EVQLLESGGGLVKPGGSLRLSCAVSGFSFSNAWMSWVRQAPGKGLEWVGRIRSKT | ADI-20970 | Heavy chain variable region |
| | | DGGTTDYAAPVKGRFTISRDDSKNTLYLQMNSLKTEDTAVYYCTTAPRYSTSWYPG | | (“HC”) amino acid sequence |
| | | YYYYYYMDVWGKGTTVTVSS | | |
| Ab 223 | 446 | DIQMTQSPSSLSASVGDRVTITCQASQDINFYLNWYQQKPGKAPKLLIYDASNLETG | ADI-20970 | Light chain variable region |
| | | VPSRFSGSVSGTDFTFTISSLQPEDFATYYCQQYDDLPAFGGGTKVEIK | | (“LC”) amino acid sequence |
| Ab 224 | 447 | EVQLVESGGGLVKPGESLRLSCAASGFTFSDYSMTWIRQAPGKGLLEWIAYINSQS | ADI-20971 | Heavy chain variable region |
| | | NYMDYADSVKGRFTISRDNAKNSLYLQMNGLRADDTAVYFCARDRRTFVAATLG | | (“HC”) amino acid sequence |
| | | WFDPWGQGTLVTVSS | | |
| Ab 224 | 448 | ETTLTQSPATLSVSPGERATLSCRASQSVSNNVAWYQQKPGQAPRVLIYAASTRAT | ADI-20971 | Light chain variable region |
| | | GIPARFSGSESGTEFTLTISSLQSEDFAVYYCQQYNNWPRTFGQGTKLEIK | | (“LC”) amino acid sequence |
| Ab 225 | 449 | QVQLQQWGAGLLRPSETLSLTCAVSGGSFSGHYWSWIRQPPGKGLEWIGGINHS | ADI-20972 | Heavy chain variable region |
| | | GNTNYSPSLRSRVTMSVDTSRNQFSLMLRSVTAADTAVYFCARNVPNLYGDYPRW | | (“HC”) amino acid sequence |
| | | FDPWGQGTLVTVSS | | |
| Ab 225 | 450 | QSVLTQPASVSGSPGQSITISCTGTSSDVGGFNYVSWYQHHPGKAPKLMIYDVNN | ADI-20972 | Light chain variable region |
| | | RPSGASNRFSGSKSGNTASLTISGLQAEDEADYYCSSYRSSDTLYVFGTGTKVTVL | | (“LC”) amino acid sequence |
| Ab 226 | 451 | EVQLLESGGGLVKPAGSLRLSCAASGFSFSSYYMNWIRQAPGKGLEWVSDISGGSS | ADI-20973 | Heavy chain variable region |
| | | YTNYADSVKGRFTVSRDNAKNSVYLQMNSLRGEDTAVYYCARGASTAATYTPTFD | | (“HC”) amino acid sequence |
| | | YWGQGILVTVSS | | |
| Ab 226 | 452 | QPVLTQPPSVSGAPGQRVTISCTGSSSNIGAGYDVHWYQQLPGTAPKLLMFGNNN | ADI-20973 | Light chain variable region |
| | | RPSGVPDRFSGSKSGTSASLAITGLRPEDEADYYCQSYDRRLTVVFGGGTKLTVL | | (“LC”) amino acid sequence |
| Ab 227 | 453 | EVQLVESGGGLVKPGGSLRLSCAASGFSFSSYQINWVRQAPGKGLEWVSSISGGSS | ADI-20974 | Heavy chain variable region |
| | | YTDYADSIKGRFTISRDNAKKSAFLQMKSLRADDTAVYYCARALMATAGGLAFDIW | | (“HC”) amino acid sequence |
| | | GQGTMVTVSS | | |
| Ab 227 | 454 | QPVLTQPPSVSGAPGQRVTISCTGSGSNIGAGYDVHWYQQVPGTAPKLLILRNTNR | ADI-20974 | Light chain variable region |
| | | PSGVPDRFSGSKSGTSASLAITGLQAEDEADYYCQSYDRSLSVVFGGGTKLTVL | | (“LC”) amino acid sequence |
| Ab 228 | 455 | QVQLVESGTHVKKPGASVKVSCEASDDTFNNKGIVWVRQAPGQGLEWMGWIRP | ADI-20975 | Heavy chain variable region |
| | | NNGNTKYAQKFQGRVTMTTDASTNTAYMELRSLRSGDTAVYYCAREQFKWNDFY | | (“HC”) amino acid sequence |
| | | FDYWGQGILVTVSS | | |
| Ab 228 | 456 | SYELMQPPSVSVAPGQTATITCGGSNIGSETVHWYQQKPGQAPVLVVHDDTDRPS | ADI-20975 | Light chain variable region |
| | | GIPERFSGSNSGNTATLTISGVEAGDEADFYCQVRDSRTDDVVFGGGTKLTVL | | (“LC”) amino acid sequence |
| Ab 229 | 457 | QVQLVESGGDLVQKGGSLRLSCAASGFTFDNYAMTWIRQAPGQGLEWVSTVSGF | ADI-20976 | Heavy chain variable region |
| | | VLGTGYTTYYADSVKGRFTISRDSSKNTVYLQLNSLRAEDTAVYYCAKCAATRNECL | | (“HC”) amino acid sequence |
| | | WDYLQQWGQGTTVTVSS | | |
| Ab 229 | 458 | EIVMTQSPSSLSASVGDRVTITCRASQSVSIYLNWYQQKGGKAPKLLIYGASALQRG | ADI-20976 | Light chain variable region |
| | | VPSRFSGSGSGTDFTLTITSLQPEDFATYFCHQSYSAPQTFGQGTKVDIK | | (“LC”) amino acid sequence |
| Ab 230 | 459 | EVQLVESGGGLVQPGGSLRLSCAASGFTFTNYAMSWVRQAPGKGLEWVSGISGS | ADI-20977 | Heavy chain variable region |
| | | GGSTYYADSVKGRFTISRDNSKNTLYLQMNSLRAEDTAVYYCAKDQGYAVVVADA | | (“HC”) amino acid sequence |
| | | TRNLPPRRYGMDVWGQGTTVTVSS | | |
| Ab 230 | 460 | EIVLTQSPGTLSLSPGERATLSCRASHSVSSSYLAWYQQKPGQAPRLLIYGASSRATGI | ADI-20977 | Light chain variable region |
| | | PDRFSGSGSGTDFTLTISRLEPEDFAVYYCQQYGSSPPLTFGGGTKVDIK | | (“LC”) amino acid sequence |
| Ab 231 | 461 | EVQLVESGAEVKKPGASVKVSCKASGYTFGNYGISWVRQAPGQGLEWMGWISAY | ADI-20978 | Heavy chain variable region |
| | | NGNSNYAQKFQGRVTMTTDTSASTAYMEVRSLRSDDTAVYYCARDVPVTAARLLD | | (“HC”) amino acid sequence |
| | | YWGQGTLVTVSS | | |
| Ab 231 | 462 | DIVLTQTPLSLPVTLGQPASISCRSSQSLVYSDGNTYLSWFQQRPGQSPRRLIYKVSN | ADI-20978 | Light chain variable region |
| | | RDSGVPDRFSGSGSGTDFTLKISRVEAEDVGVYYCMQATDWLGYTFGQGTKLEIK | | (“LC”) amino acid sequence |
| Ab 232 | 463 | EVQLQESGPGLVKPSETLSLTCTVSGGSLRSYYWSWIRQPPGKGLEWIGNIYYGGST | ADI-20979 | Heavy chain variable region |
| | | NYNSSLKGRVTISIDTSKNQFSLRLSSVTAADTAVYYCARDGLFPMGEWDYWGQGI | | (“HC”) amino acid sequence |
| | | LVTVSS | | |
| Ab 232 | 464 | QSALTQPASVSGSPGQSITISCTGTSNDVGDYNYVSWYQQHPGEAPKLMIYEVTNR | ADI-20979 | Light chain variable region |
| | | PSGVSDRFSGSKSGNTASLTISGLQAEDEADYYCSSYTSSTSVVFGGGTQLTVL | | (“LC”) amino acid sequence |
| Ab 233 | 465 | QVQLQESGPGLVKPSQTLSLTCSVSGGSVSSGDYYWTWIRQPAGKGLEWIGRIYNS | ADI-20980 | Heavy chain variable region |
| | | GGTDYSPSLKSRVTISVDTSKNQFSLKLSSVTAADTAVYYCARGRGYYESPWGQGTL | | (“HC”) amino acid sequence |
| | | VTVSS | | |
| Ab 233 | 466 | EIVLTQSPATLSLSPGERATLSCRASQSVGIYIGWYQQKPGQAPRLLMYDASNRATG | ADI-20980 | Light chain variable region |
| | | IPDRFSGSGSGTDFSLTISSLEPEDFAVYYCQLRSKWLTFGPGTKVEIK | | (“LC”) amino acid sequence |
| Ab 234 | 467 | QVQLQESGPRLVKPSETLSLICTVSGDSISSRNYFWAWIRQPPGKGLEWIGTIYYSG | ADI-20981 | Heavy chain variable region |
| | | NTYSNPSLKSRVTISVDTSKKQFSLNLSSVTAADTAVYYCARGAYGGDAFDIWGQG | | (“HC”) amino acid sequence |
| | | TVVTVSS | | |
| Ab 234 | 468 | DIRVTQSPSSVSASVGDRVTITCRASQGIGTWLAWYQQKPGKAPHLLIYAASRLQS | ADI-20981 | Light chain variable region |
| | | GVPSRFSGSGSGTDFTLSISSLHPEDFATYYCQQAYAFPRTFGQGTKVEIK | | (“LC”) amino acid sequence |
| Ab 235 | 469 | EVQLVESGPGLVKPSQTLSLICSVSGVSISRGSYYWSWIRQPAGGGLEWIGRIYTSG | ADI-20982 | Heavy chain variable region |
| | | VTRYNPSLESRVTISLDSSQNQFFLRLSSVTAADTAVYYCATRESASYSSGPDAFDIW | | (“HC”) amino acid sequence |
| | | GQGTTVTVSS | | |
| Ab 235 | 470 | DIQMTQSPSTLSASVGDRVIITCRASQSVNSWLAWYQQKPGKAPKLLIYQASSLESG | ADI-20982 | Light chain variable region |
| | | VPSRFSGSGSGTEFTLTINSLQPDDFATYYCQQYKTFSRPFGQGTKVEIK | | (“LC”) amino acid sequence |
| Ab 236 | 471 | EVQLVESGGALVQPGGSLRLSCSASGFTFSSYAMHWVRQAPGKGLEYVSAINNFG | ADI-20983 | Heavy chain variable region |
| | | DKTYYTDSVEGRFTISRDNSKKTLYLQMSSLRPEDTAVYYCVKDRGYCSSPSCYAVPY | | (“HC”) amino acid sequence |
| | | YYFYGMDVWGQGTTVTVSS | | |
| Ab 236 | 472 | EIVMTQSPSSLSASVGDRVTITCQASQGISNYLHWYQQKPGKAPKLLIYDASNLEAG | ADI-20983 | Light chain variable region |
| | | VPSRFSGSGAGTDFTFTISSLQPEDVATYYCQHYNNLPFTFGPGTKVDIK | | (“LC”) amino acid sequence |
| Ab 237 | 473 | EVQLLETGAEVKKPGASVKVSCHVSGYGLTDLSMHWVRQAPGKRLQWMGSFDP | ADI-20984 | Heavy chain variable region |
| | | QYGETIDTQNFQGRVTMTVDTSTATLYMQLSGLRSEDTAMYYCATPQSTGALDN | | (“HC”) amino acid sequence |
| | | WGQGTLVTVSS | | |
| Ab 237 | 474 | DIRVTQSPSSLSASVGDRVTITCRASQSISSYLSWYQQKPGKAPRLVIFAASNLQSGV | ADI-20984 | Light chain variable region |
| | | PSRFSGTGSSRFSDSGSWTDFTLTISSLQPEDFAIYYCQQTYITPFTFGQGTKVDIK | | (“LC”) amino acid sequence |
| Ab 238 | 475 | EVQLVESGGGLVQPGGSLRLSCVASGFTFSNYWMNWVRQAPGKGLEWVANIKE | ADI-20986 | Heavy chain variable region |
| | | DGSEIKYVDSVKGRFTISRDNAKNSLYLQMNSLRAEDTAVYYCARTEDSSSWFVAID | | (“HC”) amino acid sequence |
| | | YYNYMDVWGKGTTVTVSS | | |
| Ab 238 | 476 | DIQVTQSPGTLSLSPGERATLSCRASQTVSSSYLAWYQQKPGQAPRLLFYGASSRAT | ADI-20986 | Light chain variable region |
| | | DIPDRFSASGSGTDFTLTIHRLEPEDFAVYYCQLYGRSPPYTFGQGTKVEIK | | (“LC”) amino acid sequence |
| Ab 239 | 477 | QVQLVQSGGGVVHPGRSLRLSCAASGFSFSDYGMHWVRQAPGKGLEWVAVIWY | ADI-20987 | Heavy chain variable region |
| | | DGINKYYADSVKGRFAISRDNSKNTLYLQMNSLRAGDTAVYYCARGGIAAAQRYFD | | (“HC”) amino acid sequence |
| | | YWGQGTLVTVSS | | |
| Ab 239 | 478 | ETTLIQSPGILSLSPGERATLSCRASQTVSSSNLAWYQQKPGQAPRLLIYGASSRAT | ADI-20987 | Light chain variable region |
| | | GIPDRFSGSGSGTDFTLTISRLEPEDFAVYYCQQSGTSFGQGTKVDIK | | (“LC”) amino acid sequence |
| Ab 240 | 479 | EVQLVESGGEVKKPGASVKVSCKTSGYPFSNYGISWMRLAPGQGLEWMGWISSY | ADI-20988 | Heavy chain variable region |
| | | NGNTYYTKKFQGRVSMTTDTSTSTAYMELRSLRSDDTAVYYCARDVPVIAAHTFEY | | (“HC”) amino acid sequence |
| | | WGQGTLVTVSS | | |
| Ab 240 | 480 | ETTLTQSPLSLPVTLGQPASISCRSSESLVYSDGNTYLSWFQQRPGQSPRRIIYKVSNR | ADI-20988 | Light chain variable region |
| | | DSGVPDRFSGSGSGTDFTLKISRVEAEDVGVYYCMQATHWPRDTFGQGTKVDIK | | (“LC”) amino acid sequence |
| Ab 241 | 481 | EVQLLESGPGLVKPSGTLSLTCAVSGGSIINSNWWSWVRQSPGKGLEWIGDIYHSG | ADI-20989 | Heavy chain variable region |
| | | STTYNPSLKSRVTISVDRSKNQYSLRLTSVTAADTAVYYCAKIGPDNRSGPDYYYFM | | (“HC”) amino acid sequence |
| | | DVWGKGTTVTVSS | | |
| Ab 241 | 482 | EIVLTQSPSSLPASVGDRVTISCRASQSISNYVYWYQQKPGKAPKLLIYAASSLQSGV | ADI-20989 | Light chain variable region |
| | | PSRFSGSGSGTDFTLSISSLQFEDFATYFCQQSYSTPPTFGQGTKLEIK | | (“LC”) amino acid sequence |
| Ab 242 | 483 | EVQLVESGGGVVQPGRSLRLSCSASGFPFHSYAMHWVRQAPGKGLEWVAGIWYE | ADI-20990 | Heavy chain variable region |
| | | GSSESYADSVKGRLTISRDNSRNTLYLQMNSLRVEDTAVYYCARRGSFSGFDSWGQ | | (“HC”) amino acid sequence |
| | | GSLVTVSS | | |
| Ab 242 | 484 | DIVMTQSPLSLPVTPGEPASISCRSSQSLLHSNGYNYLDWYLQKPGQSPQLLISLGSN | ADI-20990 | Light chain variable region |
| | | RASGVPDRFSGSVAGTDFTLKISRVEAEDVGVYYCMQSSQTPYTFGQGTKVDIK | | (“LC”) amino acid sequence |
| Ab 243 | 485 | EVQLVESGGNLVKPGGSLRLSCAASGFTFSGYYMSWIRQAPGKGLEWISDISGGSS | ADI-20991 | Heavy chain variable region |
| | | YTNYADSVKGRFTISRDNAKNSLYLQMNSLRAEDTAMYYCARVEYDTTGPFHFDY | | (“HC”) amino acid sequence |
| | | WGQGTLVTVSS | | |
| Ab 243 | 486 | QPVLTQPPSVSGAPGQRVTISCTGSSSNIGAGYDVHWYQQLPGTAPKLLIYGNNNR | ADI-20991 | Light chain variable region |
| | | PSGVPDRLSGSKSGTSASLAITGLQAEDEADYYCQSYDSSLSGYVFGIGTKVTVL | | (“LC”) amino acid sequence |
| Ab 244 | 487 | EVQLVESGGGLVQPGGSLRLSCVVSGFTFKSYWMTWVRQAPGKGLEWVANIKED | ADI-20992 | Heavy chain variable region |
| | | GSEKYYVDSVKGRFTISRDNARNSLFLQMNSLRADDTAVYYCARNLEVSNEFYVVT | | (“HC”) amino acid sequence |
| | | DNYYLMDVWGQGTTVTVSS | | |
| Ab 244 | 488 | DIQLTQSPSSLSASVGDRVTITCRASQSISFFLNWYRQKPGKAPKLLIYAASTLQSGVP | ADI-20992 | Light chain variable region |
| | | SRFSGSGSGTDFTLTISSLQPEDFASYYCQQSYSTPHTFGQGTKVEIK | | (“LC”) amino acid sequence |
| Ab 245 | 489 | EVQLVESGGGVVQPGRSLRLICAASGFPFSSYAMHWVRQAPGKGLEWVAVTWY | ADI-20993 | Heavy chain variable region |
| | | DGPNRDYADSVKGRFTVSRDNSKNTLYLQMTSLRADDTAVYYCARRGSWGSFDY | | (“HC”) amino acid sequence |
| | | WGQGTLVTVSS | | |
| Ab 245 | 490 | DIVMTQSPLSLSATPGEPASISCRPSQSLLHSNGYNYLEWYLQKPGQSPQLLIYLGSN | ADI-20993 | Light chain variable region |
| | | RASGVPDRFSGGGSGTDFTLRISRVEADDVGVYYCMQASQTPYTFGQGTKVEIK | | (“LC”) amino acid sequence |
| Ab 246 | 491 | QVQLVQSGAEVKKPGASVKVSCKASGYTFSSNVIGWVRQAPGQGLEWMGWIST | ADI-20994 | Heavy chain variable region |
| | | NNGNTKYGQKFQGRVIMITDPSTSTAYMELRSLRSDDTAFYYCARESLGMGGFYF | | (“HC”) amino acid sequence |
| | | DYWGQGTLVTVSS | | |
| Ab 246 | 492 | QPVLTQPPSVSVAPGQTARITCGGDNIGSKSVHWYQQKPGQAPVLVVYDDSDRPS | ADI-20994 | Light chain variable region |
| | | GIPERFSGSNSGNTASLTISRVEAGDEADYCCQVWDSGSDLWVFGGGTKLTVL | | (“LC”) amino acid sequence |
| Ab 247 | 493 | QVQLVESGPALVKPTQTLTLTCTFSGFSLTTRGMCVSWIRQPPGKALEWLARIDWD | ADI-20996 | Heavy chain variable region |
| | | DDKYYSTSLKTRLTISKDTSKNQVVLTMTNMDPVDTATYYCARASTLTTAGYYLHYK | | (“HC”) amino acid sequence |
| | | DVWGNGTTVTVSS | | |
| Ab 247 | 494 | DIRMTQSPSSLSASVGDRVTITCRASQSIGTYLNWFQQKPGKAPNLLIYAASILHSGV | ADI-20996 | Light chain variable region |
| | | PSRFSGSGSGTDFTLTIRTLQPEDFATYYCQQSYPTVTFGQGTKVEIK | | (“LC”) amino acid sequence |
| Ab 248 | 495 | EVQLVESGGGVVQPGRSLRLSCAASGFPFNSYGMHWVRQAPGKGLEWLAVIYFD | ADI-20997 | Heavy chain variable region |
| | | ESTAYYADSVKGRFTISRDNSKSTLYLQMNSLRAADTAIYYCTTTVMIPYGGVFWG | | (“HC”) amino acid sequence |
| | | QGTLVTVSS | | |
| Ab 248 | 496 | EIVMTQSPGTLSLSPGDRATLSCRASQSVGSTHFAWYQQKPGQAPRLLIYAASIRAT | ADI-20997 | Light chain variable region |
| | | GIPDRFSGGGSGTDFTLTISRLAPEDFAVYYCQQYGSTPITFGQGTRLEIK | | (“LC”) amino acid sequence |
| Ab 249 | 497 | QVQLVQSGGGVVQPGRSLRLSCAASGFTLSTYGMHWVRQAPGKGLEWVAVIYYD | ADI-20998 | Heavy chain variable region |
| | | ESNKFYADSVQGRFTISRDDSKNTLFLQMNSLRAEDTAVYYCARESRPRGYSYSDFD | | (“HC”) amino acid sequence |
| | | SWGQGTLVTVSS | | |
| Ab 249 | 498 | QPGLTQPRSVSGSPGQSVTISCTGTSSDVGTFNYVSWYQQHPGKAPKLMIYDVNQ | ADI-20998 | Light chain variable region |
| | | RPSGVPDRFSGSKSGNTASLTISGLQAEDEADYYCCAYAGYYSFGGGTKLTVL | | (“LC”) amino acid sequence |
| Ab 250 | 499 | QVQLQESGPVLVKPSETLSLICTVSGGSITSSAYYWGWIRQPPGKGLEWIGSVSYSG | ADI-20999 | Heavy chain variable region |
| | | TTSYTPSLKSRVTISGDASKEQFSLNLRSVTAADTAVYYCARQTKAFGRRDYGMDV | | (“HC”) amino acid sequence |
| | | WGQGTTVTVSS | | |
| Ab 250 | 500 | QPVLTQPPSVSAAPGQKVTISCSGSNSNIGSNFVSWYQQLPGTAPKLLIYENNKRPS | ADI-20999 | Light chain variable region |
| | | GIPDRFSGSKSGPSATLGITGLQTEDEADYYCGTWDTGLSAHWVFGGGTKLTVL | | (“LC”) amino acid sequence |
| Ab 251 | 501 | EVQLVESGPVLVKPRGTLTLTCTVSGFSLSDARMGVSWIRQPPGKALEWLAHIFWD | ADI-21000 | Heavy chain variable region |
| | | DEKSYSTSLKNRLTISKDTSRGQVVLRMTNMDPVDTGTYFCARVNTYHSGGYYLYY | | (“HC”) amino acid sequence |
| | | FDVWGQGTLVTVSS | | |
| Ab 251 | 502 | EIVLTQSPSSLSASVGDRVTITCRASQIIASYLNWYQQKPGQAPKLLIYAASSLQSGVP | ADI-21000 | Light chain variable region |
| | | SRFSGSGSGTDFTLTISSLQPEDFATYYCQQSYSTRMYTFGQGTKVEIK | | (“LC”) amino acid sequence |
| Ab 252 | 503 | EVQLVESGPGLVKPSETLSLTCTVSGGSISDIDYYWGWIRQPPGKGLEWIGSIYYSGS | ADI-21001 | Heavy chain variable region |
| | | TYYNPSLESRVTISVDTSKNQFSLKLRSVSAADTALYHCARHGPPWVVTAIRGHAFD | | (“HC”) amino acid sequence |
| | | VWGQGTTVTVSS | | |
| Ab 252 | 504 | DIRVTQSPDSLAVSLGERATINCKSSQSILYSSNNKNYLAWYQQKPGQPPKLLIYWA | ADI-21001 | Light chain variable region |
| | | STRESGVPDRFSGSGSGTDFILTISSLQAEDVAVYYCQEYYSYPPMYTFGQGTKVDI | | (“LC”) amino acid sequence |
| | | K | | |
| Ab 253 | 505 | QVQLVESGPGLVKPSGTLSLTCAVSGDSINSGNWWNWVRQAPGKGLEWIGEIYH | ADI-21002 | Heavy chain variable region |
| | | RGTSNYNPSLKSRVTISVDQSKNQFSLKVTSLTAADTAIYYCARARGYSSGPSYYYYL | | (“HC”) amino acid sequence |
| | | DVWGKGTLVTVSS | | |
| Ab 253 | 506 | EIVMTQSPSSLSASVGDRVTISCRASQSISTYLNWYQQKPGKAPKVIIYGASNLQSGV | ADI-21002 | Light chain variable region |
| | | PSRFSGSGSGTDFTLTISSLQPEDFATYYCQKSFNPCVFGQGTKVDIK | | (“LC”) amino acid sequence |
| Ab 254 | 507 | QVQLQQWGAGLLKPSETLSLSCAVSGGSFSGYYWTWIRQPPGKGLEWIGEINHSG | ADI-21003 | Heavy chain variable region |
| | | STNYNPSLKSRVTISVDTSKNQFSLKLSSVTAADTAVYYCARARYFDYLAHWSFDLW | | (“HC”) amino acid sequence |
| | | GRGTLVTVSS | | |
| Ab 254 | 508 | GIQMTQSPLSLPVTPGEPASISCRSSQSLLHSNGYKYLDWYLQKPGQSPQLLIYLGSD | ADI-21003 | Light chain variable region |
| | | RASGVPDRFSGSGSGTDFTLKISRVEAEDVGVYYCMQALQTPWTFGQGTKLEIK | | (“LC”) amino acid sequence |
| Ab 255 | 509 | QVQLQESGGGVVQPGRSLTLSCAASGFTFSSYGMHWVRQAPGKGLDWVAEIWY | ADI-21004 | Heavy chain variable region |
| | | DGSNKYYVDSVKGRFTISRDNSKNTLYLQMKSLRAEDTAIYYCARDGGYESPFFDK | | (“HC”) amino acid sequence |
| | | WGQGTLVTVSS | | |
| Ab 255 | 510 | EIVMTQSPDSLGVSLGERATINCKSSQSLYTSNHENSLAWYQQKPGQPPRLLIYWA | ADI-21004 | Light chain variable region |
| | | STRELGVPDRFSGSGSGTDFTLTISSLQAEDVAVYYCQQYHTTPLTFGPGTKVEIK | | (“LC”) amino acid sequence |
| Ab 256 | 511 | EVQLVESGGAVVQPGGSLRLSCVASGLAFDEYTMHWVRQSSAKGLEWISLISWNG | ADI-21005 | Heavy chain variable region |
| | | GITYYADSVKGRFTISRDNSKNSLYLQMNSLRTEDTATYFCARLGYGSGSDYGDDY | | (“HC”) amino acid sequence |
| | | WGQGTLVTVSS | | |
| Ab 256 | 512 | ETTLTQSPGTLSLSPGERATLSCRASQSVSNNYLAWYQQKPGQAPRLLIHGASTRVT | ADI-21005 | Light chain variable region |
| | | GIPARFSGSGSGTDFTLTISRLEPEDFAVYYCHQYHSSPRTFGQGTKVDIK | | (“LC”) amino acid sequence |
| Ab 257 | 513 | QVTLKESGPTLVKPTQTLTLTCTFSGFSLSISGVGVGWIRQPPGKALEWLAVMYWD | ADI-21006 | Heavy chain variable region |
| | | DDKRYSPSLKTRLTITKDTSKNQVVLTMTNMAPVDTAIYYCAHLWFGEAAFDPWG | | (“HC”) amino acid sequence |
| | | QGTLVTVSS | | |
| Ab 257 | 514 | EIVLTQSPLSLPVTLRQTASISCRSGQSLLYSDGNTYLNWFQQRPGQSPRRLISIVSKR | ADI-21006 | Light chain variable region |
| | | DSGVPDRFSGSGSGTDFTLKISRVEAEDVGVYYCMQGTHWPYTFGQGTKVEIK | | (“LC”) amino acid sequence |
| Ab 258 | 515 | QVQLVQSGADVKKPGASVKVSCKSSGYTFSNHSMHWVRQAPGQGLEWMGRIHP | ADI-21007 | Heavy chain variable region |
| | | SSGTTTYAQKFQGRVTMTRDTSTSTVYMEVSSLRSEDTAVYYCARSPFFDFDFWG | | (“HC”) amino acid sequence |
| | | QGTMVTVSS | | |
| Ab 258 | 516 | SYVLTQPHSVSESPGKTVTISCTRSSGSIASNYVQWYQQRPGSAPTSVIYEDNQRPS | ADI-21007 | Light chain variable region |
| | | GVPDRFSGSIDSTSNSASLTISGLKTEDEADYYCQSYYSSGWVFGGGTKLTVL | | (“LC”) amino acid sequence |
| Ab 259 | 517 | QVQLQESGAGLLKPSETLSLTCTVYGGTFSGYHWNWIRQPPGKGLEWIGEINHRE | ADI-21008 | Heavy chain variable region |
| | | NTDYNASLESRVTISVDTSKRQFSLKMNSVTVADTAVYYCARGIQVLTNLGTEVRVH | | (“HC”) amino acid sequence |
| | | QFLDLWGRGTLVTVSS | | |
| Ab 259 | 518 | DIVLTQTPATLSLSPGERATLSCRASQSVSTYLAWYQQKPGQAPRLLIYDASNRAAGI | ADI-21008 | Light chain variable region |
| | | PARFSGSGSGTDFTLTISSLEPEDFAVYYCQQRTNWLPLTFGGGTKVDIK | | (“LC”) amino acid sequence |
| Ab 260 | 519 | QVQLVQSGAEMKTPGASVKVSCKASGYSFSNYGFTWVRQAPGQGLEWMGWIS | ADI-21009 | Heavy chain variable region |
| | | GYSAKTNYAQDLQGRVTMTIDTSTSTSYMELRSLRSDDTAVYYCARDPLGYFGSGT | | (“HC”) amino acid sequence |
| | | YRGGAFDFWGQGTTVTVSS | | |
| Ab 260 | 520 | QSALTQPASVSGSPGQSITLSCTGTNNDVGSYHLVSWYQQYPGKAPKLVIYEVTKR | ADI-21009 | Light chain variable region |
| | | PSGVSNRFSGSKSGNTASLTISGLQPEDEADYYCCSYAGDRRIFGGGTKVTVL | | (“LC”) amino acid sequence |
| Ab 261 | 521 | EVQLVESGGGVVQPGRSLRLSCAASGFSFSTYGMHWVRQAPGKGLEWVGVIWY | ADI-21010 | Heavy chain variable region |
| | | DETTKYYADSVKGRFSISRDNSKNMVYVQMNSLRADDTALYYCAREVWGGVFDI | | (“HC”) amino acid sequence |
| | | WGQGTTVTVSS | | |
| Ab 261 | 522 | DIQMTQSPATLSASVGDRVTITCRASQNIVTWLAWYQQKPGKAPNLLIYKASSLES | ADI-21010 | Light chain variable region |
| | | GVPSRFSGSGSGTEFTLTISSLQPDDFATYYCQHYNSYSGAFGQGTKVDIK | | (“LC”) amino acid sequence |
| Ab 262 | 523 | QVQLQESGPGLVKPSETLSLSCTASGDSISDYYWSWIRQPPGKGLEWIGFVSDTWG | ADI-21011 | Heavy chain variable region |
| | | TNYSPSLTSRVAISLDTSRSQVSLRLRSVTAADTAVYYCVRTHLYDRGGYYLYYFDYW | | (“HC”) amino acid sequence |
| | | GQGTLVTVSS | | |
| Ab 262 | 524 | DIRMTQSPPSLSASVGDRVTITCRASQRIASYLNWYQQKPDTAPKLLIYAASNLQTG | ADI-21011 | Light chain variable region |
| | | VPSRFSGSGSGTDFTLTISSLQPEDFATYYCQQSYSTPYTFGQGTKLEIK | | (“LC”) amino acid sequence |
| Ab 263 | 525 | QVQLVQSGPAVVKPTQTLTLTCSFSGFSLSTSRMSVSWIRQPPGKALEWLARIDWD | ADI-21012 | Heavy chain variable region |
| | | GDKYYSTSLKSRLTISKDTSKNQVVLTMTNMDPVDTATYYCARGSYYVSSGYYLNYF | | (“HC”) amino acid sequence |
| | | DYWGQGTLVTVSS | | |
| Ab 263 | 526 | DIRMTQSPSSLSASVGDRVTITCRTSQTIASYLNWYQQKPGKAPNLLIYAASILQTGV | ADI-21012 | Light chain variable region |
| | | PSRFSGSGSGTDFTLTISSLQPEDFATYYCQQSYGTPQTFGQGTKVEIK | | (“LC”) amino acid sequence |
| Ab 264 | 527 | QVQLQESGPGVVKPSETLSLTCTVSGGSISNTHSYWGWIRQSPGKGLEWIGSIYYT | ADI-21013 | Heavy chain variable region |
| | | GSTYYNPSFRSRVTLSVDTSKNQFSLKLSSVTAADTAVYYCAAPDYFVLTDYKSTFDY | | (“HC”) amino acid sequence |
| | | WGRGALVTVSS | | |
| Ab 264 | 528 | DIVMTQSPGTLSLSPGGRATLSCRASQSVGSSSLAWYQQKPGQAPRLLIYGASSRA | ADI-21013 | Light chain variable region |
| | | AGIPDRFSGSGSGTDFTLTINRLEPEDFAMYYCQQYGSSPLTFGGGTKVEIK | | (“LC”) amino acid sequence |
| Ab 265 | 529 | QVQLQESGPGLVKPSETLSLICTVSGGSISNYYWSWIRQPPGKGLEWIGYVWFGTT | ADI-21014 | Heavy chain variable region |
| | | KYNPSLKNRVTISVDTGKNQVSLKVNSVTAADTAIYYCARDSSIWYRGAFEIWGQG | | (“HC”) amino acid sequence |
| | | TTVTVSS | | |
| Ab 265 | 530 | DIRLTQSPSSLSASVGDRVTITCQASQDISNHLNWYQQRPGKAPELLIYDASTLETG | ADI-21014 | Light chain variable region |
| | | GPSRFSGSGSGTDFTLTISSLQPEDFADYYCQQYDNLPVTFGGGTKVDIK | | (“LC”) amino acid sequence |
| Ab 266 | 531 | QVQLVQSGAEVKKPGASVRVSCKVPGNTLSDLSMHWVRHTPGEGLEWMGSFDP | ADI-21015 | Heavy chain variable region |
| | | EYGETIPAQRFQGRVTMTEDTSTDTAYMELTSLRFEDTAVYYCAAPHASGALQHW | | (“HC”) amino acid sequence |
| | | GQGTLVTVSS | | |
| Ab 266 | 532 | DIVMTQSPSSLSASVGDRVTITCRASQIISAYLNWYQQKAGKAPKLLIYAASSLQSGV | ADI-21015 | Light chain variable region |
| | | PSRFSGSGSGTDFTLTISSLQPEDFATYYCQQTYITPFTFGQGTKLEIK | | (“LC”) amino acid sequence |
| Ab 267 | 533 | QVQLVESGTEVKKPGASVKVSCKASGYTFTNYGITWVRQAPGQGLEWMGCISGY | ADI-21017 | Heavy chain variable region |
| | | NGNTNYAQNLQGRVTMTTDTSTNTAYMELRSLISDDTAVYYCARDTGLTAAALLD | | (“HC”) amino acid sequence |
| | | YWGQGTLVTVSS | | |
| Ab 267 | 534 | DIVLTQSPLSLPVTLGQPASISCRSSQSLVYSDGNTYLSWFQQRPGQSPRRLIYKVSN | ADI-21017 | Light chain variable region |
| | | RDSGVPDRFGGSGSGTYFTLKISRVEAEDVGIYYCMQAIHWPLTFGGGTKVEIK | | (“LC”) amino acid sequence |
| Ab 268 | 535 | EVQLLESGGGLVKPGGSLRLSCAGSGFTLSSYGMNWVRQAPGQGLEWISSISSSSS | ADI-21018 | Heavy chain variable region |
| | | YINYADSVKGRFTISRDNAQNSLYLQLNSLRAEDTAVYYCARGGLGYDYGLGSYTYA | | (“HC”) amino acid sequence |
| | | DYWGQGTLVTVSS | | |
| Ab 268 | 536 | QSVVTQPPSVSGAPGQRVTISCTGSSSNTGAGYDIHWYQQLPGTGPKLLIYGNKNR | ADI-21018 | Light chain variable region |
| | | PSGVPDRFSGSKSGTSASLAITGLQAEDEADYYCQSYDSSLSGWVFGGGTKVTVL | | (“LC”) amino acid sequence |
| Ab 269 | 537 | EVQLLESGGGLVRPGGSLRLSCAVSGFTFSGNALTWIRRAPGKGLEWVSTIGDSGG | ADI-21019 | Heavy chain variable region |
| | | GSYYADSVKGRFTISRDNSKSTLYLQMNSLTAEDTAVYYCARDPYGDYRDYYGIDV | | (“HC”) amino acid sequence |
| | | WGQGTTVTVSS | | |
| Ab 269 | 538 | EIVMTQSPLSLPVTPGEPASISCRSSQSLRHSNGYNYVDWYLQKPGQSPQLLIYLGS | ADI-21019 | Light chain variable region |
| | | NRASGVPDRFRGSGSGTDFTLKISRVEAEDVGVYYCMQALQTPLTFGQGTKVEIK | | (“LC”) amino acid sequence |
| Ab 270 | 539 | QVQLQQWGAGLLKPSETLSLTCAVHGGSFSGFYWSWIRQSPGKGLEWIAEINDSG | ADI-21021 | Heavy chain variable region |
| | | NTNHNPSLKSRVTISIDTSKNQFSLNVSSVTAADTAVYYCAKNGGGHHYVGTLRFRS | | (“HC”) amino acid sequence |
| | | RAFDIWGQGTMVTVSS | | |
| Ab 270 | 540 | EIVMTQSPSTLSASVGDRVTITCRASQSIGNRLAWYQQKPGKAPKLLISLASGLETGV | ADI-21021 | Light chain variable region |
| | | PSRFSGSGSGTEFTLTITSLQPDDFATYYCQQYSSYGTFGQGTKLEIK | | (“LC”) amino acid sequence |
| Ab 271 | 541 | EVQLVETGPGLVKPSETLSLTCSVSGGSISSYYWSWLRQPPGKGLEWIGYIYNSGRT | ADI-21022 | Heavy chain variable region |
| | | NYNPSLRSRVTISVDTSQNQFSLRLGSVTAADTAVYYCARGGAGDDLLRGSYRYLNF | | (“HC”) amino acid sequence |
| | | WGQGTLVTVSS | | |
| Ab 271 | 542 | QSVLTQPPSVSVAPGQTARITCGGNNIGSKSVHWYQQKPGQAPVLVVYDDTERPS | ADI-21022 | Light chain variable region |
| | | GIPERISGSNSGNTATLTISRVEAGDEADYYCQVWDSSSDHPDLLFGGGTKLTVL | | (“LC”) amino acid sequence |
| Ab 272 | 543 | EVQLVESGGGLVKPGGSLRLSCAASGFRFSSYGMHWVRQAPGRGLEWVSSITAGS | ADI-21023 | Heavy chain variable region |
| | | SYMDYADSVKGRFSISRDNAKTSLYLQMNSLRAEDTAIYYCARENYDTGRGLNWF | | (“HC”) amino acid sequence |
| | | DPWGQGTLVTVSS | | |
| Ab 272 | 544 | QSVVTQPPSVSGAPGQRVTISCTGSSSNIGAGYDVHWYRQLPGTAPEVLIYGNNN | ADI-21023 | Light chain variable region |
| | | RPSGVPDRFSGSKTGTSASLAITGLLAEDGADYYCQSYDRSQLWVFGGGTQLTVP | | (“LC”) amino acid sequence |
| Ab 273 | 545 | EVQLVESGGGLVRPGGSLRLSCEASGLKLSGYSMNWVRQAPGKGLEWVSSISASSS | ADI-21025 | Heavy chain variable region |
| | | YIHYADSLKGRFTISRDNAKNSLYLQMNSLRAEDTAVYYCVASWLTPGWFDPWGQ | | (“HC”) amino acid sequence |
| | | GTLVTVSS | | |
| Ab 273 | 546 | QPVLTQPPSVSGAPGQTVTISCTGSSSNIGAGYDVHWYQQLPGTAPKLLIYGNTNR | ADI-21025 | Light chain variable region |
| | | PSGVPDRFSGSKSGTSASLAVTGLQAEDEGDYYCQSYDSSLSGSAFGGGTKLTVL | | (“LC”) amino acid sequence |
| Ab 274 | 547 | QVQLVQSGPGLVKPSQTLSLTCTVSGVSISSGGFYWSWIRQHPGKGLEWIGHIYYS | ADI-21026 | Heavy chain variable region |
| | | RSTYYNPSLKSRVTMSLNMSKNQFSLRLSSVTAADTAVYYCARERREWLHGELDY | | (“HC”) amino acid sequence |
| | | WGQGTTVTVSS | | |
| Ab 274 | 548 | DIQMTQSPDSLAVSLGEGATINCKSSQSVLDSSKNKNYLAWYQQRPGQPPKLLISW | ADI-21026 | Light chain variable region |
| | | ASTRESGVPDRFSGSGSGTDFTLTISSLQAEDVAVYSCQQYFSPPATFGQGTKLEIK | | (“LC”) amino acid sequence |
| Ab 275 | 549 | QVQLQESGPGLVKPSGTLSLTCVVSGGSIRSHNYWTWVRQPPGKGLEWIGEIYHS | ADI-21027 | Heavy chain variable region |
| | | GNTNYNPSLKSRVTLSIDKSKNVFSLRLNSVTAADTAVYYCVGGGPFAPYYFENWG | | (“HC”) amino acid sequence |
| | | QGTLVTVSS | | |
| Ab 275 | 550 | QSVLTQPPSVSGAPGQRVTISCTGSSSNIGAGYAVHWYHQLPGTAPKLLIYDNNNR | ADI-21027 | Light chain variable region |
| | | PSGVPDRFSGSKSGSSASLAITGLQAEDEADYYCQSYDRSLSGYVFGTGTKLTVL | | (“LC”) amino acid sequence |
| Ab 276 | 551 | EVQLVESGGALVKPGGSLRLSCVASGFTFSDYYMHWVRQAPGKGLEWVSYISSTSS | ADI-21028 | Heavy chain variable region |
| | | FTNYADSVKGRFIISRDNAKNSLYLQLNSLRAEDTAVYYCARDESSGWQTRRHFGM | | (“HC”) amino acid sequence |
| | | DVWGQGTLVTVSS | | |
| Ab 276 | 552 | EIVMTQSPSTLSASVGDRVTITCRASQSLNTWLAWYQHKPGKAPKLLISTASSLQSG | ADI-21028 | Light chain variable region |
| | | VPSRFSASGSGTEFTLTISSLQPDDFATYYCQQFRGTFGPGTKVEIK | | (“LC”) amino acid sequence |
| Ab 277 | 553 | QVQLVQSGAEVRKPGESLKISCKASGYSFTNYWIGWVRQMPGKGLEWMGIVYPA | ADI-21029 | Heavy chain variable region |
| | | DSHPVYSPSFQGQVTFSTDKSINTAYLQWSSLKASDTAMYFCARRDGGTDYLSDAF | | (“HC”) amino acid sequence |
| | | DIWGQGTMVTVSS | | |
| Ab 277 | 554 | DIVMTQSPSSLSASVGDRVTITCRTSQSIRRYLNWYQQKPGKAPKLLIYAASSLQSGV | ADI-21029 | Light chain variable region |
| | | PSRFSGSGSGTDFTLTISSLQPEDFATYYCQQSYSTPNTFGQGTKVEIK | | (“LC”) amino acid sequence |
| Ab 278 | 555 | EVQLVESGGGLVKPGGSLRLSCAASGFKFSTYYMSWIRQAPGKGLEWVSNISGGSS | ADI-21030 | Heavy chain variable region |
| | | YSNHADSVKGRFTISRDNAKNSLYLEMNSLRAEDTAVYYCAREDLMGVSGLAYFEY | | (“HC”) amino acid sequence |
| | | WGQGILVTVSS | | |
| Ab 278 | 556 | QPVLTQPPSVSGAPGQRVTISCTGRSSNIGAGYDVNWYKQLPGAVPKVLIYGNTNR | ADI-21030 | Light chain variable region |
| | | PSGVPDRFSGSKSGNSASLAITGLQAEDEADYYCQSYDRNLGYVFGTGTKLTVL | | (“LC”) amino acid sequence |
| Ab 279 | 557 | EVQLVESGPGLVKPSQTLSLTCTVSGGSISNSNYFWSWIRQPAGKGLEWIGRVHSS | ADI-21031 | Heavy chain variable region |
| | | GTTSYNPSLKSRITISVDASESQFSLNLTSVTAADTAIYYCARDSSDWGLGWYFDLW | | (“HC”) amino acid sequence |
| | | GRGTLVTVSS | | |
| Ab 279 | 558 | ETTLTQSPATLSLSPGERATLSCRASQSVTFYLAWYQHKPGQAPRLLIFDASKRATGI | ADI-21031 | Light chain variable region |
| | | PARFSGSGSGTDFTLTISSLEPEDFALYYCQQRSDWPQTFGQGTKVDIK | | (“LC”) amino acid sequence |
| Ab 280 | 559 | EVQLVESGGGLVKPGGSLRLSCAVSGFKFSSYTMNWVRQAPGKGLEWVSSVSASS | ADI-21032 | Heavy chain variable region |
| | | SYIFYADSVQGRFIISRDNAQNSLYLQMNSLRADDTAVYYCTRDQYGPGHYYNPA | | (“HC”) amino acid sequence |
| | | WFDPWGQGTLVTVSS | | |
| Ab 280 | 560 | QPVLTQPPSASGAPGQRVTISCTGSSSNIGAGYDVHWYQQLPGTAPKVLIYGNTNR | ADI-21032 | Light chain variable region |
| | | PSGIPDRFSGSKSGTSASLAIIGLQAEDEADYYCQSYDRNGSKVFGTGTKLTVL | | (“LC”) amino acid sequence |
| Ab 281 | 561 | QVQLVQSGAEVRKPGDSLKISCKFSENIFTTYYWTGWVRQMPGRGLEWMGIIFPG | ADI-21033 | Heavy chain variable region |
| | | DSDTRYSPSFQGHVTISVDKSIATAFLQWSSLKASDSAMYYCARAKYEGSFDMWG | | (“HC”) amino acid sequence |
| | | QGTMVTVSS | | |
| Ab 281 | 562 | DIQVTQSPSSLSASVGDRVSITCQASQDIRNRLNWYQQKPGKAPKLLIYDASILETGV | ADI-21033 | Light chain variable region |
| | | PSRFSGSGSGTDFTFSISSLQPEDFATYYCQQYDSFSLFTFGPGTKVEIK | | (“LC”) amino acid sequence |
| Ab 282 | 563 | QVQLQQSGAEVKKPGESLTISCKGSGYSFGNYWISWVRQMPGKGLEWMGRIDPS | ADI-21034 | Heavy chain variable region |
| | | DSYVNYSPSFQGNVTMSVDKSSSTAYLQWSSLKASDTAMYYCARLAGYSTLWGQ | | (“HC”) amino acid sequence |
| | | GTLVTVSS | | |
| Ab 282 | 564 | EIVLTQSPGTLSLSPGERATLSCRASQSFGSIYLAWYQQKPGQAPRLLIYGTSSRATGI | ADI-21034 | Light chain variable region |
| | | PDRFSGSGSGTDFTLTIRRLEPEDFAVYYCLYYGSSPGATFGPGTKVDIK | | (“LC”) amino acid sequence |
| Ab 283 | 565 | EVQLVESGHEVKKPGASVKVSCKASGYTFPSYGISWVRQAPGQGLEWMGWIVPY | ADI-21035 | Heavy chain variable region |
| | | NGNTKYAQRFQGRITMTTDSPTSTASMELRGLRSDDTAVYYCARVFGDGYSYGYE | | (“HC”) amino acid sequence |
| | | YWGQGTLVTVSS | | |
| Ab 283 | 566 | DIVLTQSPSTLSASVGDRVTITCRASQSISIWLAWYQQKPGKAPKLLIYKTSELVSGVP | ADI-21035 | Light chain variable region |
| | | SRFSGSGSGTEFTLTISGLQPDDFATYYCQQGNSYSHTFGQGTKVEIK | | (“LC”) amino acid sequence |
| Ab 284 | 567 | QVQLVQSGAEVKEPGKSLKISCKGSGNHFGNYWIAWVRQMPGKGLEWMGIIYPG | ADI-21036 | Heavy chain variable region |
| | | DSDTRYSPSFQDQVTISVDKSINTVYLQWSSLKAADTATYYCAGSKLGNSWYTIYDS | | (“HC”) amino acid sequence |
| | | WGQGTLVTVSS | | |
| Ab 284 | 568 | NFMLTQPASVSGSPGQSITISCAGPSALIGVYNLVSWYQQVPGKAPKLIIYEGSKRPS | ADI-21036 | Light chain variable region |
| | | GVSHRFSGSKSGYTASLTISGLQTEDEADYYCCSYAGSGTSVVFGGGTKVTVL | | (“LC”) amino acid sequence |
| Ab 285 | 569 | QVQLVQSGGGVVQPGRSLRLSCAASGFPFSSYAMHWVRQAPGKGLEWVAVIWY | ADI-21037 | Heavy chain variable region |
| | | PGGEKYSADSVTGRFTISRDNSKNTLYLQMSSLRVEDTAVYYCARRSVGAFDYWGQ | | (“HC”) amino acid sequence |
| | | GTLVTVSS | | |
| Ab 285 | 570 | DIQMTQSPLSLPVTPGEPASISCRSSQSLLNSNGYNYLDWYLQKPGQSPQVLIYLGS | ADI-21037 | Light chain variable region |
| | | HRASGVPDRFSGSGSGTDFTLRISRVEAEDVGVYYCMQAVQTPYTFGQGTKVEIK | | (“LC”) amino acid sequence |
| Ab 286 | 571 | QVQLVQSGAEVKKPGESLKISCQGFGFSFTSYWIGWVRQTPGKGLEWMGTIYPGD | ADI-21038 | Heavy chain variable region |
| | | SETRKSPSIQGQVTFSADRSISTAYLQWSGLTASDTAVYYCARLKGGWGTTMAGIR | | (“HC”) amino acid sequence |
| | | DYFYYGLDVWGQGTTVTVSS | | |
| Ab 286 | 572 | EIVLTQSPGTLSLSPGERATLSCRASQSVSSSYLAWYQQKPGQAPRLLIYGASSRATG | ADI-21038 | Light chain variable region |
| | | IPDRFTGSGSGTDFTLTISRLEPEDFAVYYCQQYATSLGGFTFGPGTKVDIK | | (“LC”) amino acid sequence |
| Ab 287 | 573 | EVQLVQSGAEVKKPGASVKVSCKASGYTFISYYIHWVRQAPGQGLEWMGVINPSG | ADI-21039 | Heavy chain variable region |
| | | GITDYAPKFQGRVSMTRDTSTRTVYLELSSLRSDDTAVYYCARDLCITTSCPRYYDYA | | (“HC”) amino acid sequence |
| | | WRSYRSEGYFDSWGQGTLVTVSS | | |
| Ab 287 | 574 | EIVMTQSPLSLPVTPGEPASISCRSSQSLLHSNGYNYLDWYLQKPGQSPQLLIYLGSN | ADI-21039 | Light chain variable region |
| | | RASGVPDRFSGSGSGTDFTLKISRVEAEDVGVYYCMQAQQAPFTFGGGTKVEIK | | (“LC”) amino acid sequence |
| Ab 288 | 575 | EVQLLESGPGLVKPSGTPSLTCAVSGVSITNSNNWWTWVRQPPGKGLEWIGEIYSS | ADI-21040 | Heavy chain variable region |
| | | GSTNYSPSLKSRVTISLDKSKNQFSLKLSSVTAADTAVYYCARVLGYYGSGGGHLHS | | (“HC”) amino acid sequence |
| | | WGPGTLVTVSS | | |
| Ab 288 | 576 | SYELTQPPSASGTPGQRVTISCSGSSSNIGAGYDVHWYQQLPGTAPKLLISVNSNRP | ADI-21040 | Light chain variable region |
| | | SGVPDRFSGSKSGTSASLAITGLQAEDEANYYCQSYDNSLSGYVVFGGGTKLTVL | | (“LC”) amino acid sequence |
| Ab 289 | 577 | EVQLVESGGVVVQPGGSLRLSCAASGFTFDDYTMHWVRQAPGKGLEWVSLISWV | ADI-21041 | Heavy chain variable region |
| | | GDTTYYADSVKGRFTISRDNSKNSLYLQMNSLRTEDTALYYCAKGGYYDGSGYYYFD | | (“HC”) amino acid sequence |
| | | YWGQGTLVTVSS | | |
| Ab 289 | 578 | DIRLTQSPSSLSASVGDRVTITCRASQSISNYLNWYQQKPGKAPKLLMYAASSLQSG | ADI-21041 | Light chain variable region |
| | | VPSRFSGSGSGTDFTLTISSLQPEDFATYSCQQSYSTPYTFGQGTKVEIK | | (“LC”) amino acid sequence |
| Ab 290 | 579 | EVQLVESGPRLVKPSQTLSLTCNVSGVPVNTGGYYWSWIRRHPIKGLEWIGYIYYSG | ADI-21042 | Heavy chain variable region |
| | | STHYNPSLRGRATMSVDTSKNQFSLRLSSVTAADTAVYYCAKDTITVLRGVAKKGVF | | (“HC”) amino acid sequence |
| | | DPWGQGILVTVSS | | |
| Ab 290 | 580 | DIQMTQSPSTLSASVGDRVIITCRASQSISSWLAWYQYKPGKAPNLLIYKATTLDSG | ADI-21042 | Light chain variable region |
| | | VPSRFSGSGSGTEFTLTISSLQPDDFATYYCQQYDSYPTFGQGTKVEIK | | (“LC”) amino acid sequence |
| Ab 291 | 581 | QVQLVQSGAEVKKPGASVKVSCKASGYTFTSYGITWVRQAPGQGLEWMGWISTY | ADI-21043 | Heavy chain variable region |
| | | NGKTNYAQKFKGRVTMTTDTSTSTAYVELTSLRSDDTAVYYCAREFPTRIVDSFYM | | (“HC”) amino acid sequence |
| | | DVWGKGTTVTVSS | | |
| Ab 291 | 582 | SYELTQPPSVSVAPGQTARITCGGSNIGSETVHWYQQKPGQAPVLVVYGDSDRPS | ADI-21043 | Light chain variable region |
| | | GIPERFSGSNSGNTATLTISRVEAGDEADYYCQVWDSRSDDFHVFGSGTKLTVL | | (“LC”) amino acid sequence |
| Ab 292 | 583 | QVQLVQSGAELKKPGESLKISCKTSGYTFANYWIGWVRQMPGKGLEWMGIIYPGD | ADI-21044 | Heavy chain variable region |
| | | SDTRYSPSFQGQVTFSADKSINSAYLQWHSLKASDSAIYYCARRFSPDYSDGAAPPT | | (“HC”) amino acid sequence |
| | | LSDAFDVWGQGTTVTVSS | | |
| Ab 292 | 584 | DIVMTQSPSSLSASVGDRVTITCRASQNINIYLNWYQQKPGKAPKLLIYAASTLQSG | ADI-21044 | Light chain variable region |
| | | VPSRFSGSGSATDFTLTISSLQPEDFATYYCQQSYRTPNDFGRGTKVDIK | | (“LC”) amino acid sequence |
| Ab 293 | 585 | EVQLVESGGGLVKPGGSLRLSCLASGFKFRSYSMNWVRQAPGTGLVWVASISASSS | ADI-21045 | Heavy chain variable region |
| | | FIFYADSLKGRFTISRDNDKNSLYLQMNSLTVEDTAVYYCVRDMSGISSGGKTFDYW | | (“HC”) amino acid sequence |
| | | GQGTLVTVSS | | |
| Ab 293 | 586 | QSVLTQPPSVSGAPGQRVTISCTGSSSNLGAGYDVQWYQQLPGTAPKLLIYGNNN | ADI-21045 | Light chain variable region |
| | | RPSGVPDRFSGSKSGTSASLAITGLRAEDEADYYCQSYDTSPVFGGGTKLTVL | | (“LC”) amino acid sequence |
| Ab 294 | 587 | EVQLVESGAEAKKPGESLRISCTVSGYSFSKYWVGWVRQTPGKGLEWMGIIDPTDS | ADI-21046 | Heavy chain variable region |
| | | DTRYSPSFQGQVTISVDNSINTAYLQWSSLKASDTAIYYCARRGQAKCVGNCPRDF | | (“HC”) amino acid sequence |
| | | MDVWGKGTTVTVSS | | |
| Ab 294 | 588 | SYVLTQPPSVSGAPGQRVTISCAGSSSNIGAGYEVHWYQQLPGTAPKLLIYANRNR | ADI-21046 | Light chain variable region |
| | | PSGVPDRFSGSRSGTSASLAISGLQAEDEADYYCQSYDNNLSGSWVFGGGTKLTVL | | (“LC”) amino acid sequence |
| Ab 295 | 589 | QVQLQQWGAGLLKPSETLSLTCAVYGGSFSGKYWSWIRQPPGKGLEWIGEFNHD | ADI-21047 | Heavy chain variable region |
| | | GTTYYNPSLKSRVTISADTPKNQFSLTLHSVTAADTAVYYCARLTILSDWGQGTLVTV | | (“HC”) amino acid sequence |
| | | SS | | |
| Ab 295 | 590 | DIRMTQSPSSLSASVGDRVTITCQASQDISNYLHWYQQKPGKAPKLLIYDASNLETG | ADI-21047 | Light chain variable region |
| | | VPSRFSGSGSGTDFTFTIHSLQPEDLATYYCQQYYDLPRTFGQGTKLEIK | | (“LC”) amino acid sequence |
| Ab 296 | 591 | EVQLVESGAEVKKPGASVKVSCKASGYTFSSHAISWVRQAPGHGLEWMGWISVF | ADI-21048 | Heavy chain variable region |
| | | NGNTNYAQKFQGRVTMTTDTSTSTAYMELRSLRSDDAAVYYCAREVIGVGEFYFD | | (“HC”) amino acid sequence |
| | | YWGQGTLVTVSS | | |
| Ab 296 | 592 | QSVLTQPPSVSVAPGQTARITCGGNNIGSKSVHWYQQKAGQAPVLVVYDDSDRPS | ADI-21048 | Light chain variable region |
| | | GIPERFLGSNSGNTATLTISRVEAGDEADYYCQVWDSSGDFHVFGTGTKVTVL | | (“LC”) amino acid sequence |
| Ab 297 | 593 | EVQLVESGGGLVKPGGSLRLSCSASGFAFSSYSMNWVRQAPGKGLEWVSSISASSS | ADI-21049 | Heavy chain variable region |
| | | YIFYADSVKGRFTISRDNAKNSLYLQMNSLRAEDTAFYYCARALSPGYGDYRDYWG | | (“HC”) amino acid sequence |
| | | QGTLVTVSS | | |
| Ab 297 | 594 | QSVVTQPPSVSGAPGQRVTISCTGSSSNIGAGYDVHWYQQLPGAAPKLLIYGNNN | ADI-21049 | Light chain variable region |
| | | RPSGVPDRFSGSKSGTSASLAITGLQAEDEADFYCQSYDHNLSVVFGGGTKLTVL | | (“LC”) amino acid sequence |
| Ab 298 | 595 | QVQLVQSGAEVKKPGASVKVSCTASGYTFANNGISWVRQAPGQGLEWMGWISA | ADI-21050 | Heavy chain variable region |
| | | YNGNTKYAQTVQGRVILTIDTSTSTAYMELRSLTSDDTAVYYCAREMGVDAAATF | | (“HC”) amino acid sequence |
| | | DYWGQGTLVTVSS | | |
| Ab 298 | 596 | EIVMTQSPLFLSVTLGQPASISCRSSQSLVYSDTNTYLTWFQQRPGQSPRRLIYKVSN | ADI-21050 | Light chain variable region |
| | | RDSGVPDRFSGSGSGTYFTLKISRVEAEDIGVYYCMQAIHWPRTFGQGTKLEIK | | (“LC”) amino acid sequence |
| Ab 299 | 597 | QVQLVESGPGLVRPSQTLSLTCNVSGDFISRGTYYWSWIRQSAGKGLEWIGRIYTS | ADI-21051 | Heavy chain variable region |
| | | GITDYSPSLKSRVTISVDTSKNQFFLKLASVTAADTAVYYCARGRGYYDSPWGQGTL | | (“HC”) amino acid sequence |
| | | VTVSS | | |
| Ab 299 | 598 | ETTLTQSPATLSLSPGERATLSCRASESVSTFLGWYQQKPGQAPRLLIYDASNRASG | ADI-21051 | Light chain variable region |
| | | VPARFSGSGSGTDFTLTISSLEPEDFAVYYCQLRNKWLTFGPGTKVDIK | | (“LC”) amino acid sequence |
| Ab 300 | 599 | QVQLVQSGAEVKKPGASVKVSCKASGYTFTSYGISWVRQAPGQGLEWMGWISAY | ADI-21052 | Heavy chain variable region |
| | | NGNTNYAQNLQGRVTMTTDTSTSTAYMELRSLRSDDTAMYYCARDAFSRVGYWY | | (“HC”) amino acid sequence |
| | | FDLWGRGTLVTVSS | | |
| Ab 300 | 600 | SYELTQPPSVSVAPGQAARITCGGNNIGSKTVHWYQQKPSQAPVLVVYDDSDRPS | ADI-21052 | Light chain variable region |
| | | GIPERFSGSNSGNTATLTISRVEAGDEADYYCQVWDSSGDHPVFGGGTKLTVL | | (“LC”) amino acid sequence |
| Ab 301 | 601 | QVQLQESGPGLVKPSQTLSLTCTVSGVSISNSSGGYYWSWIRQHPGKGLEWIGYIYY | ADI-21053 | Heavy chain variable region |
| | | SGSTYYNPSSGSTYYNPSLKSRVTVSVDTSKNQFSLKLTSVTAADTAVYYCARDIRGP | | (“HC”) amino acid sequence |
| | | HKHSLYNWFHPWGQGTLVTVSS | | |
| Ab 301 | 602 | DIQMTQSPSSLSASVGDRVTITCRASQSISSYLNWYQQKPGKAPKLLIYAASSLQTG | ADI-21053 | Light chain variable region |
| | | VPSRFSGSGSGTDFTLTISSLQPEDFATYYCQQSYSTLRTFGQGTKVDIK | | (“LC”) amino acid sequence |
| Ab 302 | 603 | QVQLVESGGGVVQPGRSLRLSCAASGFSFSNYGMHWVRQAPGKGLEWVVGISFD | ADI-21054 | Heavy chain variable region |
| | | GSYIFHGGSVTGRFNISRDNSKNTLYLQVNSVRAEDTAVYYCARDPQYYDDWSGYS | | (“HC”) amino acid sequence |
| | | GLLHYYLYMDVWGKGTTVTVSS | | |
| Ab 302 | 604 | DIQLTQSPSTLSASVGDRVTITCRASQSIGTSLAWYQQIPGKAPKLLIYRASSLESGVP | ADI-21054 | Light chain variable region |
| | | SRFSGGGSGTQFTLTISSLQPDDFATYYCQQYNNYSPTFGQGTKLEIK | | (“LC”) amino acid sequence |
| Ab 303 | 605 | EVQLVESGGGVVQPGRSLRLSCVGSGFTFSRYGMQWVRQAPGKGLEWAAVIWN | ADI-21055 | Heavy chain variable region |
| | | DGSNEHYADSVKGRFTISRDNSKNTMYLQMNSLRAEDTALYYCAREGEYSSSWSH | | (“HC”) amino acid sequence |
| | | WSYLDLWGRGTLVTVSS | | |
| Ab 303 | 606 | QPGLTQPPSASGTPGQRVTISCSGSTSNIGGNTVNWYQQLPGTAPTVLIYQNRQRP | ADI-21055 | Light chain variable region |
| | | SGVPDRFSGSKSGTSASLAISGLQSDDEADYYCAAWDDSLNGWVFGGGTKLTVL | | (“LC”) amino acid sequence |
| Ab 304 | 607 | EVQLLESGGGLVKPGGSLKLSCAASGFTLRSYYMHWVRQAPGRGLEWVSSISASSS | ADI-21056 | Heavy chain variable region |
| | | YINYVDAVKGRFTVSRDNAKNSLFLQMNSLRAEDTAVYYCAREGGAMTNFGVVIDI | | (“HC”) amino acid sequence |
| | | WGQGTMVTVSS | | |
| Ab 304 | 608 | SYVLTQPPSVSGAPGQRVTISCTGSSSNIGAGYDVHWYQQLPGTAPKLLIYTNTNRP | ADI-21056 | Light chain variable region |
| | | SGVPDRFSGSKSGTSASLAITGLQSDDEADYYCQSYDSSLSGPVVFGGGTKLTVL | | (“LC”) amino acid sequence |
| Ab 305 | 609 | QVQLVQSGAEVKKPGESLKISCKASGYSLSNNWIAWVRQMPGKGLEWMGIVYLG | ADI-21057 | Heavy chain variable region |
| | | DSDARYSPSFQGQVTFSADKSISTAYLQWSSLQASDTAMYFCARHHGDLVVTSDSR | | (“HC”) amino acid sequence |
| | | YFYGLDVWGQGTTVTVSS | | |
| Ab 305 | 610 | DIVMTQSPATLSVSPGERATLSCRASQSISSNLAWYQQKPGQAPRLLIYGASTRATG | ADI-21057 | Light chain variable region |
| | | IPARFSGSGSGTEFTLTISSLQSEDFAVYYCQQYNNWPPSDTFGQGTRLEIK | | (“LC”) amino acid sequence |
| Ab 306 | 611 | QVQLQESGPGLVKPSETLSLTCTVSGGSISGTTYYWAWIRQPPGKGLEWIGTIFYSG | ADI-21058 | Heavy chain variable region |
| | | STYYNPSLQSRVTTSVDASKNQMSLRLSSVTAADTAMYYCARHTSIYDNLTGFYSHL | | (“HC”) amino acid sequence |
| | | TGVLDMWGQGTMVTVSS | | |
| Ab 306 | 612 | DIQLTQSPATLSVSPGERATLSCRASQSVSTNLAWYQQKRGQAPRLLIYGASTRAIGI | ADI-21058 | Light chain variable region |
| | | PARFSGSGSGTEFTLTISSLQSEDFAVYYCQQYNNWPPAYTFGQGTKVDIK | | (“LC”) amino acid sequence |
| Ab 307 | 613 | QVQLVQSGAEVKRPGDSLKISCKGSGYSFTTSWIGWVRQVPGKGLEWMGIIYPGD | ADI-21059 | Heavy chain variable region |
| | | SNTVYGPSLQGQVTISADKSTNTAYLQWSSLKASDTAMYYCARRDGGTDYLSDAF | | (“HC”) amino acid sequence |
| | | DIWGQGTFVTVSS | | |
| Ab 307 | 614 | DIQMTQSPSSLSASVGDRVTITCRTSQNIVIYLNWYQQKPGKAPKLLIFAASSLPSGV | ADI-21059 | Light chain variable region |
| | | PSRFSGSGSGTDFTLTISSLQPEDVATYYCQQSYNTPGTFGQGTKVDIK | | (“LC”) amino acid sequence |
| Ab 308 | 615 | EVQLVESGGGLVKPGGSLRLSCEASGFRLSDYYMTWIRQAPGKGLECISYISGGSTF | ADI-21060 | Heavy chain variable region |
| | | KSYSDSVKGRFTISRDNTNLYLQMNSLRVEDTAVYYCARAPYLIYYMDVWGKGTTV | | (“HC”) amino acid sequence |
| | | TVSS | | |
| Ab 308 | 616 | QPVLTQPPSVSGAPGQRVSISCTGSNSNIGAGYDVHWYQQLPGTPPKLLIYDNNN | ADI-21060 | Light chain variable region |
| | | RPSGVPDRFSGSKSGTSASLAITGLQAEDEADYYCQSYDNRLSGSQVLFGGGTKVTV | | (“LC”) amino acid sequence |
| | | L | | |
| Ab 309 | 617 | QVQLVQSGAEVKKPGSSVKVSCKASGGTFSNYPISWVRQAPGHGLEWMGRVVPT | ADI-21061 | Heavy chain variable region |
| | | VGLANYAQNLQGRVTITADTSTNTVYMELRSLRSEDTGLYYCARRAVVDTYAFDIW | | (“HC”) amino acid sequence |
| | | GQGTLVTVSS | | |
| Ab 309 | 618 | QSALIQPASVSGFPGQSITISCTGASSDVGGYNFVSWYQQHPGKAPKLIIYEVTKRPS | ADI-21061 | Light chain variable region |
| | | GVSNRFSGSESGNTASLTISGLQAEDEADYYCSSFRYTSSIVYVFGSGTKVTVL | | (“LC”) amino acid sequence |
| Ab 310 | 619 | EVQLLESGGGLVKPGGSLRLSCAASGFTFSDYDMIWVRQAPGKGLEWVSSISRGSD | ADI-21062 | Heavy chain variable region |
| | | YIYYADSLKGRFTISRDNARNSVTLQMNSLRAGDTALYFCARAELLDSGGYYLYYFD | | (“HC”) amino acid sequence |
| | | HWGQGTLVTVSS | | |
| Ab 310 | 620 | DIRMTQSPSSLSASVGDRVTITCRASQIIASYVNWYQKKPGKAPKVLIYAASRLQNG | ADI-21062 | Light chain variable region |
| | | VPSRFSGSGSGTEFTLTISSLQPEDFATYYCQQSYSTSFTFGQGTKVDIK | | (“LC”) amino acid sequence |
| Ab 311 | 621 | EVQLVESGGGLVQPGGSLRLSCSASGFTFRTYVMQWVRQAPGKGLEYVSAISSDG | ADI-21063 | Heavy chain variable region |
| | | GSTDYADSVKGRFTVSRDNSKNTLYLQMSSLRAEDTAVYYCVKRGEGGNDYLYYY | | (“HC”) amino acid sequence |
| | | MDVWGKGTTVTVSS | | |
| Ab 311 | 622 | DIQVTQSPSSLSASVGDRVTITCRASQSITNYLNWYQQKPGKAPKVLIYAASSLQSG | ADI-21063 | Light chain variable region |
| | | VPSRFSGSGSGTDFTLTISSLQPEDFATYYCQQSYLRPPTFGGGTKVEIK | | (“LC”) amino acid sequence |
| Ab 312 | 623 | EVQLVESGGEVKKPGASVKVSCKASGYIFSNHGVSWVRQAPGQGLEWMGWISAY | ADI-21064 | Heavy chain variable region |
| | | NGNAIYAQNLQGRVILTIDTSTSTAYMELTSLTSDDTAIYYCARESGATAAAVMDY | | (“HC”) amino acid sequence |
| | | WGQGTLVTVSS | | |
| Ab 312 | 624 | DIVLTQTPLSLPVILGQPASISCRSSQSLVYSDGNTYLTWFQQRPGQSPRRLIYKVSN | ADI-21064 | Light chain variable region |
| | | RDSGVPDRFSGSGSDTDFTLKISRVEAEDVGVYYCMQGIDWPRTFGQGTKVDIK | | (“LC”) amino acid sequence |
| Ab 313 | 625 | EVQLLESGGGLVQPGGSLRLSCAASGFTFSSYAMNWVRQAPGKGLEWVSGISGSG | ADI-21065 | Heavy chain variable region |
| | | ESTYYADSVKGRFTISRDSSKNTVYLQMNSLRADDTAVYYCAKDQGYGVVVPAATR | | (“HC”) amino acid sequence |
| | | ALPPRRYGMDVWGQGTTVTVSS | | |
| Ab 313 | 626 | EIVLTQSPGTLSLSPGERATLSCRASQSVSSTYLAWYQQKPGQAPRLLIYGASSRATG | ADI-21065 | Light chain variable region |
| | | IPDRFSGSGSGTDFTLTITRLEPEDFAVYYCQQYGSSPPLTFGGGTKVDIK | | (“LC”) amino acid sequence |
| Ab 314 | 627 | QVQLQESGPGLVKPSGTLSLICVVSGGSIKSHNYWTWVRQPPGKGLEWVGEIYQS | ADI-21068 | Heavy chain variable region |
| | | GRTNYNPSLNSRVTLSMDKSKNQLSLRLTSVTAADTAVYFCVGGGPFAPYYFQTW | | (“HC”) amino acid sequence |
| | | GQGTLVTVSS | | |
| Ab 314 | 628 | QSVLTQPPSVSGAPGQRVTISCTGSSSNIGAGYDVHWYQQLPGTAPKLLIYNNNNR | ADI-21068 | Light chain variable region |
| | | PSGVPDRFSGSKSGTSASLAITGLQAEDEADYYCQSYDTSLSGYVFGTGTKVTVL | | (“LC”) amino acid sequence |
| Ab 315 | 629 | EVQLVESGAEVRKPGASVKVSCKASGYTFSSNAISWVRQAPGQGLEWMGYISVFN | ADI-21069 | Heavy chain variable region |
| | | GNTKYAQNLQGRVTMTTDTATSTVYMELRSLRYDDTAIYYCARESLGMGGFYFDH | | (“HC”) amino acid sequence |
| | | WGQGTLVTVSS | | |
| Ab 315 | 630 | SYELTQPPSVSVAPGQTARITCGANNIGSDSVHWYQQKPGQAPVLVVFDDRDRPS | ADI-21069 | Light chain variable region |
| | | GIPERFSGSNSGNTATLTISRVEAGDEADYYCQVWMTSDRSVFGGGTKLTVL | | (“LC”) amino acid sequence |
| Ab 316 | 631 | EVQLVESGGGLVQPGGSLRLSCAASGFTFSRYAMGWVRQAPGKGLEWVSTISDSG | ADI-21070 | Heavy chain variable region |
| | | GSTFYADSVEGRFTIARDSSKNTLSLHMNSLRAEDTAIYYCAREAYSSSWYSGGWFD | | (“HC”) amino acid sequence |
| | | RWGQGTLVTVSS | | |
| Ab 316 | 632 | ETTLTQSPATLSVSPGERATLSCRASQSVSSNLAWYQQKPGQAPRLLIYGASTRATG | ADI-21070 | Light chain variable region |
| | | IPARFSGSGSGAEFTLTINSLQSEDFAIYYCQQYNNWPQYTFGQGTKVDIK | | (“LC”) amino acid sequence |
| Ab 317 | 633 | EVQLVESGGGVVQPGKSLRLSCAVSGFTFSDHDMHWVRQAPGKGLEWVAAIWS | ADI-21071 | Heavy chain variable region |
| | | DRTTKYYGDFVKGRFTISRDNSKNTLYLQMNSLRAEDTAVYYCARGQIYKSGGYYLV | | (“HC”) amino acid sequence |
| | | HLDHWGQGTLVTVSS | | |
| Ab 317 | 634 | DIQVTQSPSSLSASVGDRVTITCRASQSIASYLNWYQQKPGKAPNLLIYAASNLQSE | ADI-21071 | Light chain variable region |
| | | VPSRFSGSGSGTDFTLTISGLQPEDFATYYCQQSYNIRLLTFGGGTKVEIK | | (“LC”) amino acid sequence |
| Ab 318 | 635 | QVQLVQSGGGLVKPGGSLRLSCEASGFNFRSYHMSWVRQAPGKGLEWVSSITAG | ADI-21072 | Heavy chain variable region |
| | | SSYINYADSVKGRFTISRDNAKNSVLQMNSLSAEDTAVYYCAREGLNMGVGGTW | | (“HC”) amino acid sequence |
| | | FDPWGQGTLVTVSS | | |
| Ab 318 | 636 | QAVVTQEPSVSGAPGQRVTISCTGSSSNIGAGYDVHWYQQLPGTAPKLLIYGNNN | ADI-21072 | Light chain variable region |
| | | RPSGVPDRFSGSKSATSASLAITGLQADDEADYYCQSYDRSLSGSWVFGIGTKVTVL | | (“LC”) amino acid sequence |
| Ab 319 | 637 | EVQLVESGGGLVRPGRSLRLSCAASGFTFSMFSMNWVRQAPGKGLEWLAYIGGS | ADI-21073 | Heavy chain variable region |
| | | GSTIDYANSVSGRFTISRDNAKNSLYLQMNSLRDEDTAVYYCARIGLQTYNSHSSSSS | | (“HC”) amino acid sequence |
| | | PARAFDVWGQGTTVTVSS | | |
| Ab 319 | 638 | DIVLTQSPSSLSASVGDRVTITCRASQSIGRFLNWYQQKPGKAPKLLIYAASSLESGV | ADI-21073 | Light chain variable region |
| | | PSRFSGSGSGTQFSLTISSLQPEDFTTYYCQQSYSTPTTFGGGTKVDIK | | (“LC”) amino acid sequence |
| Ab 320 | 639 | EVQLVESGGGLVKPGGSLRLSCAASGFSFSNYYMSWVRQAPGKGLEWISYISGGST | ADI-21075 | Heavy chain variable region |
| | | YANLADSVKGRFTISRDNTKNSMYLQMTSLRPDDTAVYYCARIHGTHGPFYFDYW | | (“HC”) amino acid sequence |
| | | GQGTLVTVSS | | |
| Ab 320 | 640 | QSVLTQPPSVSGAPGQRVTISCTGSSSNIGAGYDVHWYQQLPGTAPKLLIHANSNR | ADI-21075 | Light chain variable region |
| | | PSGVPDRFSGSKSGTSASLAITGLQAEDEADYYCQSYDNSLNAYYVFGTGTKLTVL | | (“LC”) amino acid sequence |
| Ab 321 | 641 | EVQLVESGGGLVRPGGSLRLSCAASGFTFSSYAMDWVRQAPGKGLEWVSSISASSS | ADI-21076 | Heavy chain variable region |
| | | FISYTDSVKGRFTISRDNAKNSLFLQMDNVTAEDTAVYYCARDYYESGRYFYGNPFD | | (“HC”) amino acid sequence |
| | | IWGQGTMVTVSS | | |
| Ab 321 | 642 | QPVLTQPPSVSGAPGQRVTISCTGSGSNIGAGFDVHWYQQLPGTAPKLLIYANSDR | ADI-21076 | Light chain variable region |
| | | PSGVPDRFSASKSGTSASLAITGLQAEDEAHYYCQSYDNSLGGLCVFGIGTKLTVL | | (“LC”) amino acid sequence |
| Ab 322 | 643 | QVQLVESGGGLVKPGGSLRLSCVVSGFTFRDYYMSWIRQAPGKGLEWISYISPSSTY | ADI-21077 | Heavy chain variable region |
| | | TNYADSVRGRFTISRDNAENSLYLQMNSLRAEDTAVYYCARVNIAATGAGGVFLDY | | (“HC”) amino acid sequence |
| | | WGQGTTVTVSS | | |
| Ab 322 | 644 | QPVLTQPPSVSGAPGQRVTISCAGSSSNIGAGYDVHWYQQLPGTAPKLLIYGNINR | ADI-21077 | Light chain variable region |
| | | PSGVPDRFSGSKSGTSASLAITGLQAEDEADYYCQSYDSSLSGSYVFGIGTKVTVL | | (“LC”) amino acid sequence |
| Ab 323 | 645 | EVQLVESGGGLVKPGGSLRLSCAASGFRLSDYYMSWIRQAPGKGLEWISDISGGST | ADI-21078 | Heavy chain variable region |
| | | YTNYADSVKGRLTISRDNAQNSLYLQMNSLRAEDTAVYYCARWGSGGPDAFHFW | | (“HC”) amino acid sequence |
| | | GQGTTVTVSS | | |
| Ab 323 | 646 | QSVLTQPPSVSGVPGQRVTISCTGSRSNIGAGYDVHWYRQLPGTAPKLLIYGNSNR | ADI-21078 | Light chain variable region |
| | | PSGVPDRFSGSKSGTSASLAITGLQADDEADYYCQSYDSSLSGSVIFGGGTKVTVL | | (“LC”) amino acid sequence |
| Ab 324 | 647 | EVQLLESGGGLVKPGGSLRLSCAASGFTFSDYYMSWIRQAPGKGLEWVSNISGGST | ADI-21079 | Heavy chain variable region |
| | | YTNYADSVKGRFTISRDNAKNSLYLQMNSLRAEDTAVYYCAREAYGSGNYYNPNW | | (“HC”) amino acid sequence |
| | | LDPWGQGTLVTVSS | | |
| Ab 324 | 648 | QSVLTQPPSVSGAPGQRVTISCTGSSSNIGAGYDVHWYQQLPGTAPKLLIYGNRNR | ADI-21079 | Light chain variable region |
| | | PSGVPDRFSGSKSGTSASLAITGLQAEDEADYYCQSYDSSLSGSVFGGGTKLTVL | | (“LC”) amino acid sequence |
| Ab 325 | 649 | EVQLLESGGGLVKPGGSLRLSCEVSGFRLSDYYMSWIRQAPGKGLEWVSHISGGST | ADI-21080 | Heavy chain variable region |
| | | YTNYADSVKGRFTISRDNGKKSMYLQMNSLRAEDTALYYCAKWGSGGPEAFDIW | | (“HC”) amino acid sequence |
| | | GRGTMVTVSS | | |
| Ab 325 | 650 | QSALIQPPSVSGAPGQRVTISCTGSSSNIGAGYDVHWYQQIPGTAPKWYGNNNR | ADI-21080 | Light chain variable region |
| | | PSGVPDRFSGSKSGTSASLAITGLQAEDEADYYCQSYDNSLSGSVVFGGGTKLTVL | | (“LC”) amino acid sequence |
| Ab 326 | 651 | EVQLLESGGGLVKPGGSLRLSCAASRFAFSNYYMTWIRQAPGKGLEWISNISGGSTF | ADI-21081 | Heavy chain variable region |
| | | TNYADSVKGRFTISRDNAKNSVHLQMNSLRAEDTAVYYCVREASVAAGTPEGFDI | | (“HC”) amino acid sequence |
| | | WGQGTMVTVSS | | |
| Ab 326 | 652 | QSVLTQPPSVSGAPGQRVIISCTGSSSNIGAGYDVNWYQQLPGTAPKLLMYGNRN | ADI-21081 | Light chain variable region |
| | | RASGVPDRFSGSKSGTSASLAITGLQAEDEADYYCHSYDSSLGGSVFGGGTKLTVL | | (“LC”) amino acid sequence |
| Ab 327 | 653 | EVQLVESGGGLVKPGGSLKLSCVASGLKFSSYSMNWVRQAPGKGLEWVSSVSAGS | ADI-21082 | Heavy chain variable region |
| | | SYTNYADSVKGRFTISRDNAKNSLYLQMNSLRVDDTAVYYCATERCSGGSCYLHGF | | (“HC”) amino acid sequence |
| | | DPWGQGTTVTVSS | | |
| Ab 327 | 654 | QSVLTQPPSVSGAPGQRVTISCTGSSSNIGAGYDVHWYQQLPGTAPKLLIFDNIIRP | ADI-21082 | Light chain variable region |
| | | SGVPDRFSGSKSGTSASLAITGLQADDEADYYCQSYDKSGDYVFGTGTKVTVL | | (“LC”) amino acid sequence |
| Ab 328 | 655 | QVQLQESGPGLVKPSGTLSLICAVSGDSITTSNWWSWVRQPPGKGLEWIGEIYHS | ADI-21083 | Heavy chain variable region |
| | | GVTRYNPSLKSRLSISLDKSRNQFSLKLSSVTAADTAVYYCARDEALFGHWFDPWG | | (“HC”) amino acid sequence |
| | | QGTLVTVSS | | |
| Ab 328 | 656 | QSVLTQPRSVSGSPGQSVTISCTGSSSDIGSYNYVSWYQQHPGKAPKLMLYDVSKR | ADI-21083 | Light chain variable region |
| | | PSGVPDRFSGSKSVKTASLTISGLQAEDEADYYCCTYAGNSVVFGGGTKLTVL | | (“LC”) amino acid sequence |
| Ab 329 | 657 | EVQLVESGAEVKKPGASVTVSCKASGYTFTSNTISWLRQAPGQGLEWLGWVSASN | ADI-21084 | Heavy chain variable region |
| | | GNTKYAQKFQGRVTMTTDTSATTAYMEVRTLRHDDTAIYYCARDILDMGGFHFD | | (“HC”) amino acid sequence |
| | | NWGQGTLVTVSS | | |
| Ab 329 | 658 | SYVLTQPPSVSVAPGQTARITCGGNNIGNKHVHWYKQKPGQAPVLVVYDDSDRPS | ADI-21084 | Light chain variable region |
| | | GIPERFSGSNSGNTATLTVSRVEAGDEADFYCQVWDNTNDHPVFGGGTKVTVL | | (“LC”) amino acid sequence |
| Ab 330 | 659 | EVQLVETGGGLVKPGGSLRLSCEASGFNFRSYSMNWVRQAPGKGLEWVSSISASSS | ADI-21085 | Heavy chain variable region |
| | | YINYADSVKGRFTISRDNSKNSLYLQMNSLRAEDTGVYYCARVLVHYYYGMDVWG | | (“HC”) amino acid sequence |
| | | QGTTVTVSS | | |
| Ab 330 | 660 | QSVLTQPPSVSAAPGQRVTISCTGTSSNIGAGYDVHWYQQLPGRAPKLLILGNNNR | ADI-21085 | Light chain variable region |
| | | PSGVPDRFSGSKSGTSASLAITGLQAEDEADYYCQTYDKTLMEIFGGGTKLTVL | | (“LC”) amino acid sequence |
| Ab 331 | 661 | EVQLVETGGGLVKPGGSLRLSCAASPFAFSNYYMSWIRQAPGKGLEWISNISGGST | ADI-21086 | Heavy chain variable region |
| | | FTNYADSVKGRFTISRDNARNSLYLLMNNLRTEDTAVYYCAREASVAAGTPEGFDV | | (“HC”) amino acid sequence |
| | | WGQGTTVTVSS | | |
| Ab 331 | 662 | QSVVTQPPSVSGAPGQRVTISCTGSSSNIGAGYDVNWYQQFPGTAPKLLIYGNRNR | ADI-21086 | Light chain variable region |
| | | PSGVPARFSGSKSGASASLAITGLQAEDEADYYCHSYDSGLSGSVFGGGTKLTVL | | (“LC”) amino acid sequence |
| Ab 332 | 663 | EVQLVESGGGLVQPGGSLRLSCAASGFTFSGYEMNWVRQAPGKGLEWLSYISSSG | ADI-21087 | Heavy chain variable region |
| | | GIIYYADSVKGRFTISRDNARNSLFLQMNSLRAEDTAVYSCARARLLDGFDIWGQGT | | (“HC”) amino acid sequence |
| | | MVTVSS | | |
| Ab 332 | 664 | DIQVTQSPSTLSASVGDRVTITCRASQSIGSWLAWYQQKPGKAPKLLIYKASSLESG | ADI-21087 | Light chain variable region |
| | | VPSRFSGSGSGTEFTLTISSLQPDDFATYYCQQYNSYSYTFGQGTKVEIK | | (“LC”) amino acid sequence |
| Ab 333 | 665 | EVQLLESGGGLVKPGGSLRLSCVASGFRFTSYSMNWVRQAPGKGLEWVSSISASSS | ADI-21089 | Heavy chain variable region |
| | | YVDYADSLKGRFTISRDNAQNSLFLQMNSLRAEDTAVYYCARDYYDSGNYHSPFP | | (“HC”) amino acid sequence |
| | | MDVWGQGTTVTVSS | | |
| Ab 333 | 666 | QSVLTQPPSVSGAPGQRVTISCTGSRSNIGAGYDVHWYQQLPGTAPKLLIYGNNKR | ADI-21089 | Light chain variable region |
| | | PSGVPDRFSGSKSGTSASLAITGLQAEDEADYYCQSYDSGPIFGGGTKVTVL | | (“LC”) amino acid sequence |
| Ab 334 | 667 | EVQLLESGGGLVKPGGSLRLSCAASGFTSGFTFSDFYMSWIRLTPGKGLEWISYISTH | ADI-21090 | Heavy chain variable region |
| | | STSTNYADSVRGRFIISRDDARNSLFLQMNSLRAEDTAVYYCAGYYYGSGSYFFDH | | (“HC”) amino acid sequence |
| | | WGQGTLVTVSS | | |
| Ab 334 | 668 | ETTLTQSPATLSVSPGERATLSCRASQSVSSNVAWYQQKPGQAPRLLIYSASSRDTG | ADI-21090 | Light chain variable region |
| | | IPVRFSGSGSGTEFTLSISSLQSEDFAVYYCQQYSDWPTFGQGTKVEIK | | (“LC”) amino acid sequence |
| Ab 335 | 669 | QVQLVQSGAEVKKPGESLRISCQYSAYGFSTYWISWVRQLPGKGLEWMGRIDPSD | ADI-21091 | Heavy chain variable region |
| | | SHTTYSPSFQGHVTLSADKSISTVYLQWSSLKASDTAMYYCARHQEYSGSDLDSWG | | (“HC”) amino acid sequence |
| | | QGTLVTVSS | | |
| Ab 335 | 670 | QPVLTQPPSVSAAPGQRVTISCSGTRSNIGYNFVSWYQQLPGTAPKLLIYDNNKRPS | ADI-21091 | Light chain variable region |
| | | GIPDRFSGSKSGTSATLAITGLQTGDEADYYCGTWDSSLSALFGGGTKVTVL | | (“LC”) amino acid sequence |
| Ab 336 | 671 | EVQLLESGGGVVQPGRSLRLSCVASGFTFSTYGVHWVRQAPGKGLEWVAVISYDG | ADI-22756 | Heavy chain variable region |
| | | ANKDYADSVKGRFTISRDNSKNTLYLQMNSLRAEDTAVYYCAKMITRVLPGGFDR | | (“HC”) amino acid sequence |
| | | WGQGTLVTVSS | | |
| Ab 336 | 672 | EIVMTQSPGTLSLSPGERATLSCRASQSVSSAYLAWYQQKPGQAPRLLIYDASRRAT | ADI-22756 | Light chain variable region |
| | | GIPDRFSGSGSGTDFTLTISRLEPEDFAVYYCQQYGSSRFTFGQGTKVEIK | | (“LC”) amino acid sequence |
| Ab 337 | 673 | EVQLLESGAEVKKPGASVKVSCKASGYTFSNYGISWVRQAPGQGLEWMGWISVY | ADI-22757 | Heavy chain variable region |
| | | NGNTEYAQKFQGRLTMTTDTSTSTAYMELRSLRSDDTAVYYCARDPPAVAASFMD | | (“HC”) amino acid sequence |
| | | VWGQGTTVTVSS | | |
| Ab 337 | 674 | EIVLTQSPLSLPVTLGQPASISCRSSQSLVHSEGNTYLSWFQQRPGQSPRRLIYKVSN | ADI-22757 | Light chain variable region |
| | | RDSGVPDRFSGSGSGTDFTLKISRVEAEDVGLYFCMQGTHWPPTFGGGTKVEIK | | (“LC”) amino acid sequence |
| Ab 338 | 675 | QVQLVESGGGLVKPGGSLRLSCAASGFSISSYSMNWVRQAPGKGLEWVSSISGSSS | ADI-22758 | Heavy chain variable region |
| | | YIYYGDSVKGRFTISRDNARNSLYLQMNSLRAEDTAVYYCARGDIAAAGTITYYFAH | | (“HC”) amino acid sequence |
| | | WGQGTLVTVSS | | |
| Ab 338 | 676 | QSVLTQPPSVSGAPGQRVTISCTGSSSNIGAGYDVHWYQQLTGTAPKLLIFGNNNR | ADI-22758 | Light chain variable region |
| | | PSGVPDRFSGSKSGTSASLAITGLQAEDEADYYCQSYDSSLSGAVFGGGTQLTVL | | (“LC”) amino acid sequence |
| Ab 339 | 677 | EVQLLESGGGLVKPGGSLRLSCAASGFSFSSYTMNWVRQAPGKGLEWVSSITGGSS | ADI-22759 | Heavy chain variable region |
| | | YIDYAGSLKGRFTISRDNAKNSLYLQMNSLRVEDTAVYYCARDFPNIAVGGKTLDY | | (“HC”) amino acid sequence |
| | | WGQGTLVTVSS | | |
| Ab 339 | 678 | QPVLTQPPSVSGAPGQRVTISCTGSSSNIGAGYDVHWFQQLPGTAPKLLIYVNNNR | ADI-22759 | Light chain variable region |
| | | PSGVPDRFSGSKSGTSASLAITGLQAEDEADYYCQSYDRLSAVVFGGGTKVTVL | | (“LC”) amino acid sequence |
| Ab 340 | 679 | EVQLVESGGGLVQPGRSLRLSCVASGFTFDDYAMHWVRQAPGKGLEWVSGINW | ADI-22760 | Heavy chain variable region |
| | | NSGGIGYADSVKGRFTISRDNTKNSLYLQMNSLRAEDTALYYCAKDGSALMGYGVE | | (“HC”) amino acid sequence |
| | | VWGQGTTVTVSS | | |
| Ab 340 | 680 | SYELTQPPSASGTPGQRVTISCSGSNSNIGNNYVYWYQQLPGTAPKLLIYRNNQWP | ADI-22760 | Light chain variable region |
| | | SGVPDRFSASKSGTSASLAISGLRSEDEADYYCASWDDSLSALVFGGGTKLTVL | | (“LC”) amino acid sequence |
| Ab 341 | 681 | EVQLVESGPGLVKPSQTLSLTCAISGDSVSSNSVAWNWIRQSPSRGLEWLGRTYYQ | ADI-22762 | Heavy chain variable region |
| | | SKWYNDYAVSVKSRISVNPDTSKNQFSLQLNSLTPEDTAVYYCVRGCSWGFGWYF | | (“HC”) amino acid sequence |
| | | DLWGRGTLVTVSS | | |
| Ab 341 | 682 | QSVLTQPPSVSGAPGQRVTISCTGSSSNIGAIYDVHWYQQFPGTAPKLLIYGNTNRP | ADI-22762 | Light chain variable region |
| | | SGVPDRFSGSKSGTSASLAITGLQAEDEADYYCQSYDSSLSGYVFGTGTKVTVL | | (“LC”) amino acid sequence |
| Ab 342 | 683 | EVQLVESGGGLIQPGGSLRLSCAASGFTFSTYEMNWVRQAPGKGLEWVSSISTSGS | ADI-22763 | Heavy chain variable region |
| | | TKDYAGSVKGRFTVSRDNAKNSLYLQMNSLRAEDTAIYYCARVYYYDSSGYYLALFD | | (“HC”) amino acid sequence |
| | | YWGQGTLVTVSS | | |
| Ab 342 | 684 | EIVLTQSPSSLSASVGDRVTITCRASQSIASYLNWYQQKPGKAPKLLIYAASSLRSGVP | ADI-22763 | Light chain variable region |
| | | SRFSGSGSGTDFTLTISSLQPEDFATYYCQQSYSTPSLTFGGGTKLEIK | | (“LC”) amino acid sequence |
| Ab 343 | 685 | QVQLVESGPGLVRPSGTLSLTCAVSGGSISGKNWWSWVRQPPGKGLEWIGEIDHS | ADI-22764 | Heavy chain variable region |
| | | GSTNYNPSLKSRVTISVDKSKNQFSLKLSSVTAADTAVYYCARTGLYDSSGYYLYYFN | | (“HC”) amino acid sequence |
| | | YWGQGTLVTVSS | | |
| Ab 343 | 686 | EIVMTQSPSSLSASVGDRVTISCRASQTIASYVNWYQQRPGKAPNLLIFAASNLQTG | ADI-22764 | Light chain variable region |
| | | VPSRFRGSGSGTVFTLTISSLQPEDFATYYCQQSYSTPRTFGQGTKVDIK | | (“LC”) amino acid sequence |
| Ab 344 | 687 | EVQLVESGGGLVKPGGSLRLSCAASGFTFSSYSMNWVRQAPGKGLEWVSSISSSSS | ADI-22765 | Heavy chain variable region |
| | | YIYYADSVKGRFTISRDNAKNSLYLQMNSLRAEDTAVYYCARDRGDGYNYDYWGQ | | (“HC”) amino acid sequence |
| | | GTLVTVSS | | |
| Ab 344 | 688 | QPVLTQPPSVSGAPGQRVTISCTGSSSNIGAGYDVHWYQQLPGTAPKLLIYGNSNR | ADI-22765 | Light chain variable region |
| | | PSGVPDRFSGSKSGTSASLAITGLQAEDEADYYCQSYDSSLSVVGGGGTKVTVL | | (“LC”) amino acid sequence |
| Ab 345 | 689 | EVQLVESGGGLVQPGRSLRLSCAASGFTFDDYAMHWVRQAPGKGLEWVSGISW | ADI-22766 | Heavy chain variable region |
| | | NSGSIGYADSVKGRFTISRDNAKNSLYLQMNSLRAEDTALYYCAKDGRFSLSHTYYF | | (“HC”) amino acid sequence |
| | | DYWGQGTLVTVSS | | |
| Ab 345 | 690 | QPVLTQPPSASGSPGQSVTISCTGTSSDVGGYNYVSWYQQHPGKAPKLMIYEVSKR | ADI-22766 | Light chain variable region |
| | | PSGVPNRFSGSKSGNTASLIVSGLQAEDEADYYCSSYAGSNNLYVFGTGTKVTVL | | (“LC”) amino acid sequence |
| Ab 346 | 691 | QVQLVESGGGLVKPGGSLRLSCAASGFTFSSYSMNWVRQAPGKGLEWVSSISSSSS | ADI-22767 | Heavy chain variable region |
| | | YIYYADSVKGRFTISRDNAKNSLYLQMNSLRAEDTAVYYCAREANWGVAFDIWGQ | | (“HC”) amino acid sequence |
| | | GTMVTVSS | | |
| Ab 346 | 692 | QSVVTQPPSVSGAPGQRVTISCTGSSSNIGAGYDVHWYQQLPGTAPKLLIYGNSNR | ADI-22767 | Light chain variable region |
| | | PSGVPDRFSGSKSGTSASLAITGLQAEDEADYYCQSYDSSLSYVFGIGTKVTVL | | (“LC”) amino acid sequence |
| Ab 347 | 693 | EVQLVESGGGLVQPGGSLRLSCAASGFTFSSYEMNWVRQAPGKGLEWVSYISSSG | ADI-22768 | Heavy chain variable region |
| | | STIYYADSVKGRFTISRDNAKNSLYLQMNSLRAEDTAVYYCAKSYIYDSSGYYLYYFDY | | (“HC”) amino acid sequence |
| | | WGQGTLVTVSS | | |
| Ab 347 | 694 | EIVMTQSPSSLSASVGDRVTITCRASQSISSYLNWYQQKPGKAPKLLIYAASSLQSGV | ADI-22768 | Light chain variable region |
| | | PSRFSGSGSGTDFTLTISSLQPEDFATYYCQQSYSTPGTFGQGTKVDIK | | (“LC”) amino acid sequence |
| Ab 348 | 695 | QVQLVQSGGGLVQPGGSLRLSCAASGFTFSDHYMDWVRQAPGKGLEWVGRTRN | ADI-22769 | Heavy chain variable region |
| | | KANSYTTEYAASVKGRFTISRDDSKNSLYLQMNSLKTEDTAVYYCARVGYYYYYGM | | (“HC”) amino acid sequence |
| | | DVWGQGTTVTVSS | | |
| Ab 348 | 696 | SYVLTQPPSVSVSPGQTASITCSGDKLGDKYACWYQQKPGQSPVLVIYQDSKRPSGI | ADI-22769 | Light chain variable region |
| | | PERFSGSNSGNTATLTISGTQAMDEADYYCQAWDSSTPLFGGGTKVTVL | | (“LC”) amino acid sequence |
| Ab 349 | 697 | QVTLKESGPALVKPTQTLTLTCTFSGFSLSTSGMCVSWIRQPPGKALEWLALIDWD | ADI-22770 | Heavy chain variable region |
| | | DDKYYSTSLKTRLTISKDTSKNQVVLTMTNMDPVDTATYYCARSPGRAVAGTDYW | | (“HC”) amino acid sequence |
| | | GQGTLVTVSS | | |
| Ab 349 | 698 | SYELTQPPSVSVSPGQTASITCSGDKLGDKYACWYQQKPGQSPVLVIYQDSKRPSGI | ADI-22770 | Light chain variable region |
| | | PERFSGSNSGNTATLTISGTQAMDEADYYCQAWDSSTAVVFGGGTKLTVL | | (“LC”) amino acid sequence |
| Ab 350 | 699 | EVQLVESGGGLVKPGGSLRLSCAASGFTFSSYSMNWVRQAPGKGLEWVSSISSSSS | ADI-22771 | Heavy chain variable region |
| | | YIYYADSVKGRFTISRDNAKNSLYLQMNSLRAEDTAVYYCARDYSSGWYYFDYWG | | (“HC”) amino acid sequence |
| | | QGTLVTVSS | | |
| Ab 350 | 700 | QPVLTQPPSVSGAPGQRVTISCTGSSSNIGAGYDVHWYQQLPGTAPKLLIYGNSNR | ADI-22771 | Light chain variable region |
| | | PSGVPDRFSGSKSGTSASLAITGLQAEDEADYYCQSYDSSLSGSVFGGGTKLTVL | | (“LC”) amino acid sequence |
| Ab 351 | 701 | EVQLVESGGGVVQPGRSLRLSCAASGFTFSSYAMHWVRQAPGKGLEWVAVISYD | ADI-22772 | Heavy chain variable region |
| | | GSNKYYADSVKGRFTISRDNSKNTLYLQMNSLRAEDTAVYYCARAVEQQLFIWYYG | | (“HC”) amino acid sequence |
| | | MDVWGQGTTVTVSS | | |
| Ab 351 | 702 | SYELIQPPSVSVSPGQTASITCSGDKLGDKYACWYQQKPGQSPVLVIYQDSKRPSGI | ADI-22772 | Light chain variable region |
| | | PERFSGSNSGNTATLTISGTQAMDEADYYCQAWDSSTDVVFGGGTQLTVL | | (“LC”) amino acid sequence |
| Ab 352 | 703 | QVQLVQSGAEVKKPGASVKVSCKASGYTFTSYGISWVRQAPGQGLEWMGWISAY | ADI-22773 | Heavy chain variable region |
| | | NGNTNYAQKLQGRVTMTTDTSTSTAYMELRSLRSDDTAVYYCARESALSRDGYNY | | (“HC”) amino acid sequence |
| | | GDVDYWGQGTLVTVSS | | |
| Ab 352 | 704 | ETTLTQSPLSLPVTLGQPASISCRSSQSLVYSDGNTYLNWFQQRPGQSPRRLIYKVSN | ADI-22773 | Light chain variable region |
| | | RDSGVPDRFSGSGSGTDFTLKISRVEAEDVGVYYCMQGTHWPPTFGQGTKLEIK | | (“LC”) amino acid sequence |
| Ab 353 | 705 | EVQLLESGGGLVKPGGSLRLSCAASGFTFSSYSMNWVRQAPGKGLEWVSSISSSSS | ADI-22774 | Heavy chain variable region |
| | | YIYYADSVKGRFTISRDNAKNSLYLQMNSLRAEDTAVYYCAREGASGYNYRYYFDY | | (“HC”) amino acid sequence |
| | | WGQGTLVTVSS | | |
| Ab 353 | 706 | QSVLTQPPSVSGAPGQRVTISCTGSSSNIGAGYDVHWYQQFPGAAPKLLIYGNNN | ADI-22774 | Light chain variable region |
| | | RPSGVPDRFSGSKSGTSASLAITGLQADDEADYYCQSYDSSLSGYVVFGGGTKLTVL | | (“LC”) amino acid sequence |
| Ab 354 | 707 | EVQLLESGGGVVQPGRSLRLSCAASGFTFSDYGMHWVRQAPGKGLEWVAVIWYD | ADI-22775 | Heavy chain variable region |
| | | GSYKYYADSVKGRFTISRDNSKNTLFLQMNSLRAEDTAVYYCARESLQTHDAFDIW | | (“HC”) amino acid sequence |
| | | GQGTMVTVSS | | |
| Ab 354 | 708 | DIQMTQSPSSLSASVGDRVTITCRASQGISNSLAWYQQKPGKAPKLLLYAASRLESG | ADI-22775 | Light chain variable region |
| | | VPSRFSGSGSGTDYTLTINSLQPEDFATYFCQQYYSTLTWTFGQGTKVDIK | | (“LC”) amino acid sequence |
| Ab 355 | 709 | EVQLLESGGGLVKPGGSLRLSCAASGFTFSDYYMSWIRQAPGKGLEWVSYISSSGST | ADI-22776 | Heavy chain variable region |
| | | IYYADSVKGRFTISRDNAKNSLYLQMNSLRAEDTAVYYCAREIGGSYTGGAFDIWG | | (“HC”) amino acid sequence |
| | | QGTMVTVSS | | |
| Ab 355 | 710 | SYELTQPPSVSVAPGQTARITCGGNNIGSKSVHWYQQKPGQAPVLVVYDDSDRPS | ADI-22776 | Light chain variable region |
| | | GIPERFSGSNSGNTATLTISRVEAGDEADYYCQVWDSSSDHVVFGGGTKVTVL | | (“LC”) amino acid sequence |
| Ab 356 | 711 | QVQLVQSGAEVKRPGASVKVSCKASEYTFNFHDINWVRQAPGQGLEWMGWMN | ADI-22777 | Heavy chain variable region |
| | | PKSGNTGYAQKFQGRVTMTRDTSKNTAYLELSSLRSEDTAVYYCARGYGTSWSSDS | | (“HC”) amino acid sequence |
| | | WWGQGTLVTVSS | | |
| Ab 356 | 712 | SYELTQLPSVSVSPGQTARITCSGDALSKQFVYWYQQKPGLAPMLVIYKDTNRPSW | ADI-22777 | Light chain variable region |
| | | IPERFSGSGSGTTATLTISEVQAEDEADYYCQSVDNSGTYGWVFGGGTKVTVL | | (“LC”) amino acid sequence |
| Ab 357 | 713 | EVQLVESGPGLVKPSETLSLTCTVSGGSINSYSWTWIRQPPGKGLEWLGSFDYSGSN | ADI-22778 | Heavy chain variable region |
| | | TYNPSLKSRVTIAVDTSKNQFSLKLTSATAADTAVYYCARAPVYDSSGYYLYYFDNW | | (“HC”) amino acid sequence |
| | | GQGTLVTVSS | | |
| Ab 357 | 714 | DIQMTQSPSSLSASVGDRVTITCRASQSIASYLNWYQQKPGKAPKLLIFAASNLHSG | ADI-22778 | Light chain variable region |
| | | VPSRFSGSGSGTTFTLTISSLQPEDFATYYCQQSYSIRFFTFGPGTKLEIK | | (“LC”) amino acid sequence |
| Ab 358 | 715 | QVQLQQWGAGLLKPSETLSLTCAVYGGSFSDYSWTWIRQPPGKGLEWIGEISHTGI | ADI-22779 | Heavy chain variable region |
| | | TNYNPSLKSRVNISVDTSKNQFSLKLSSVTAADTAVYYCARADAYDSSGYYVYYFDY | | (“HC”) amino acid sequence |
| | | WGQGTLVTVSS | | |
| Ab 358 | 716 | DIQVTQSPPSLSASVGDRVTITCRASQTIASYLNWYHQKPGKAPELLIYAASSLQSGV | ADI-22779 | Light chain variable region |
| | | PSRFSGSGSGTAFTLTISSLQPEDFATYYCQQSYSAPPSFGQGTKVEIK | | (“LC”) amino acid sequence |
| Ab 359 | 717 | EVQLVESGPTLVKPTQTLTLICTFSGFSLSTSGVGVGWIRQPPGKALEWLALIYWDD | ADI-22780 | Heavy chain variable region |
| | | DKRYSPSLKSRLTITKDTSKNQVVLTMTNMDPVDTATYYCAHRGRQYSYGYYYFDY | | (“HC”) amino acid sequence |
| | | WGQGTLVTVSS | | |
| Ab 359 | 718 | QSVLIQPASVSGSPGQSITISCTGTSSDVGGYNFVSWYQQHPGKAPKLMIYDVSNR | ADI-22780 | Light chain variable region |
| | | PSGVSNRFSGSKSGNTASLTISGLQAEDEADYYCSSYTSSTLDVFGTGTKVTVL | | (“LC”) amino acid sequence |
| Ab 360 | 719 | EVQLVESGGGLVQPGGSLRLSCAASGFTFSSYEMNWVRQAPGKGLEWVSYISSSG | ADI-22781 | Heavy chain variable region |
| | | STIYYADSVKGRFTISRDNAKNSLYLQMNSLRAEDTAVYYCARGGAVAGTRTGGFDI | | (“HC”) amino acid sequence |
| | | WGQGTTVTVSS | | |
| Ab 360 | 720 | SYELTQPPSVSVSPGQTARITCSGDALPKQYAYWYQQKPGQAPVLVIYKDSERPSGI | ADI-22781 | Light chain variable region |
| | | PERFSGSSSGTTVTLTISGVQAEDEADYYCQSADSSGTYQVFGGGTKLTVL | | (“LC”) amino acid sequence |
| Ab 361 | 721 | EVQLVESGGGLVKPGGSLRLSCAASGFIFSDYYMSWIRQAPGKGLEWVSNISGGSS | ADI-24792 | Heavy chain variable region |
| | | FTNYADSVKGRFTISRDNAKNSLYLQMNSLRAEDTAVYYCARDLGYCSSNSCLDAF | | (“HC”) amino acid sequence |
| | | DIWGQGTTVTVSS | | |
| Ab 361 | 722 | QSVLTQPPSVSGAPGQRVTISCTGSSSNIGAGYDVHWYQQLPGTAPKLLIYGNTNR | ADI-24792 | Light chain variable region |
| | | PSGVPDRFSGSRSGTSASLAITGLQAEDEADYYCQSYDSSLSGSLFGGGTKVTVL | | (“LC”) amino acid sequence |
| Ab 362 | 723 | QVQLVQSGAEVKKPGESLKISCKGSGYSFTSYWIGWVRQMPGKGLEWMGIIYPGD | ADI-24793 | Heavy chain variable region |
| | | SDTRYSPSFQGQVTISADKSISTAYLQWSSLKASDTAMFYCVMGSYSYYFDYWGQG | | (“HC”) amino acid sequence |
| | | TLVTVSS | | |
| Ab 362 | 724 | NFMLTQPHSVSESPGKTVTISCTRSSGSIASNYVQWYQQRPGSAPTTVIYEDNLRPS | ADI-24793 | Light chain variable region |
| | | GVPDRFSGSIDSSSNSASLTISGLKTEDEADYYCQSYDSSNQVFGGGTKLTVL | | (“LC”) amino acid sequence |
| Ab 363 | 725 | EVQLVESGGGLVKPGGSLRLSCAASGFTFSSYSMNWVRQAPGKGLEWVSSISSSSS | ADI-24795 | Heavy chain variable region |
| | | YIYYADSVKGRFTISRDNAKNSLYLQMNSLRAEDTAVYYCARVGYSSSSGAFDYWG | | (“HC”) amino acid sequence |
| | | QGTLVTVSS | | |
| Ab 363 | 726 | QSVLTQPPSVSGAPGQRVTISCTGSSSNIGAGYDVHWYQQLPGTAPKLLIYGNSNR | ADI-24795 | Light chain variable region |
| | | PSGVPDRFSGSKSGTSASLAITGLQAEDEADYYCQSYDSSLSGSVFGGGTKVTVL | | (“LC”) amino acid sequence |
| Ab 364 | 727 | QVQLVQSGGGVVQPGRSLRLSCAASGFTFSSYGMHWVRQAPGKGLEWVAVIWY | ADI-24796 | Heavy chain variable region |
| | | DGSNKYYADSVKGRFTISRDNSKNTLYLQMNSLRAEDTAVYYCARTAYGSGSYPIYY | | (“HC”) amino acid sequence |
| | | YYYMDVWGKGTTVTVSS | | |
| Ab 364 | 728 | SYELTQPPSVSVSPGQTASITCSGDKLGDKYACWYQQKPGQSPVLVIYQDSKRPSGI | ADI-24796 | Light chain variable region |
| | | PERFSGSNSGNTATLTISGTQAMDEADYYCQAWDSSTVVFGGGTKLTVL | | (“LC”) amino acid sequence |
| Ab 365 | 729 | EVQLLESGPGLVKPSETLSLTCTVSGGSISSYYWSWIRQPPGKGLEWIGYIYYSGSTN | ADI-24798 | Heavy chain variable region |
| | | YNPSLKSRVTISVDTSKNQFSLKLSSVTAADTAVYYCARILGHCSGGSCYRIIDYWGQ | | (“HC”) amino acid sequence |
| | | GTLVTVSS | | |
| Ab 365 | 730 | QPVLTQPPSVSVSPGQTASITCSGDKLGDKYACWYQQKPGQSPVLVIYQDSKRPSG | ADI-24798 | Light chain variable region |
| | | IPERFSGSNSGNTATLTISGTQAMDEADYYCQAWDSSTGVFGGGTKLTVL | | (“LC”) amino acid sequence |
| Ab 366 | 731 | EVQLVESGGGLVKPGGSLRLSCAASGFTFSSYSMNWVRQAPGKGLEWVSSISSSSS | ADI-24799 | Heavy chain variable region |
| | | YIYYADSVKGRFTISRDNAKNSLYLQMNSLRAEDTAVYYCAREGRDGYNYYFDYWG | | (“HC”) amino acid sequence |
| | | QGTLVTVSS | | |
| Ab 366 | 732 | QSVLTQPPSVSGAPGQRVTISCTGSSSNIGAGYDVHWYQQLPGTAPKLLIYGNSNR | ADI-24799 | Light chain variable region |
| | | PSGVPDRFSGSKSGTSASLAITGLQAEDEADYYCQSYDSSLSGSVFGGGTKLTVL | | (“LC”) amino acid sequence |
| Ab 367 | 733 | EVQLLESGGGLVKPGGSLRLSCAASGFTFSSYSMNWVRQAPGKGLEWVSSISSSSS | ADI-24800 | Heavy chain variable region |
| | | YIYYADSVKGRFTISRDNAKNSLYLQMNSLRAEDTAVYYCARVRGGYSYGYGMDV | | (“HC”) amino acid sequence |
| | | WGQGTTVTVSS | | |
| Ab 367 | 734 | QSVVTQPPSVSGAPGQRVTISCTGSSSNIGAGFDVHWYQQLPGTAPKLLIYGNSNR | ADI-24800 | Light chain variable region |
| | | PSGVPDQFSGSKSGTSASLAITGLQAEDEADYYCQSYDSSLSGVVFGGGTKLTVL | | (“LC”) amino acid sequence |
| Ab 368 | 735 | QVQLVQSGAEVKKPGASVKVSCKASGYTFTSYGISWVRQAPGQGLEWMGWISAY | ADI-24801 | Heavy chain variable region |
| | | NGNTNYAQKLQGRVTMTTDTSTSTAYMELRSLRSDDTAVYYCARVTARTFGGIRK | | (“HC”) amino acid sequence |
| | | GYYYGMDVWGQGTTVTVSS | | |
| Ab 368 | 736 | SYELTQPPSVSVSPGQTASITCSGDKLGDKYACWYQQKPGQSPVLVIYQDSKRPSGI | ADI-24801 | Light chain variable region |
| | | PERFSGSNSGNTATLTISGTQVMDEADYYCQAWDSSTVVFGGGTKLTVL | | (“LC”) amino acid sequence |
| Ab 369 | 737 | EVQLLESGGGLVLPGGSLRLSCAASGFTFSSYAMSWVRQAPGKGLEWVSAISGSGI | ADI-24803 | Heavy chain variable region |
| | | YTYYADSVKGRFTISRDNSKNTLYLQMSSLRAEDTAVYYCAKGSLGMAYSAFDIWG | | (“HC”) amino acid sequence |
| | | LGTTVTVSS | | |
| Ab 369 | 738 | DIQLTQSPGTLSLSSGERATLSCRASQSVSSNYLAWYQQKPGQPPRLLIYGASSRAT | ADI-24803 | Light chain variable region |
| | | GIPDRFSGSGSGTDFTLTISRLEPEDFAVYYCQQYGSSPLTFGGGTKVDIK | | (“LC”) amino acid sequence |
| Ab 370 | 739 | QVQLVQSGGGLVKPGGSLRLSCAASGFTFSSYSMNWVRQAPGKGLEWVSSISSSS | ADI-24805 | Heavy chain variable region |
| | | SYIYYADSVKGRFTISRDNAKNSLYLQMNSLRAEDTAVYYCAREGYSSSSGYYYYMD | | (“HC”) amino acid sequence |
| | | VWGKGTTVTVSS | | |
| Ab 370 | 740 | QSVLTQPPSVSGAPGQRVTISCTGSSSNIGAGYDVHWYQQLPGTAPKLLIYGNSNR | ADI-24805 | Light chain variable region |
| | | PSGVPDRFSGSKSGTSASLAITGLQAEDEADYYCQSYDSSLSGSVFGIGTKVTVL | | (“LC”) amino acid sequence |
| Ab 371 | 741 | EVQLVESGPGLVKPSETLSLICTVSGGSISSSSYYWGWIRQPPGKGLEWIGSIYYSGS | ADI-24807 | Heavy chain variable region |
| | | TYYNPSLKSRVTISVDTSKNQFSLKLSSVTAADTAVYYCARHVNPYYDSSGTPYYYYG | | (“HC”) amino acid sequence |
| | | MDVWGQGTTVTVSS | | |
| Ab 371 | 742 | SYELTQPPSVSVSPGQTASITCSGDKLGDKYACWYQQKPGQSPVLVIYQDSKRPSGI | ADI-24807 | Light chain variable region |
| | | PERFSGSNSGNTATLTISGTQAMDEADYYCQAWDSGTVVFGGGTKLTVL | | (“LC”) amino acid sequence |
| Ab 372 | 743 | QVQLVQSGAEVKKPGASVKVSCKASGYTFTGYYMHWVRQAPGQGLEWMGWIN | ADI-24808 | Heavy chain variable region |
| | | PNSGGTNYAQKFQGWVTMTRDTSISTAYMELSRLRSDDTAVYYCARGDPAANDY | | (“HC”) amino acid sequence |
| | | WGQGTLVTVSS | | |
| Ab 372 | 744 | QPVLTQPPSASGSPGQSVTISCTGTSSDVGGYNYVSWYQQHPGKAPKLMIYEVSKR | ADI-24808 | Light chain variable region |
| | | PSGVPDRFSGSKSGNTASLIVSGLQAEDEADYYCSSYAGSNNVVFGGGTKLTVL | | (“LC”) amino acid sequence |
| Ab 373 | 745 | QVQLVQSGAEVKKPGASVKVSCKASGYTFTSYDINWVRQATGQGLEWMGWMN | ADI-24811 | Heavy chain variable region |
| | | PNSGNTGYAQKFQGRVTMTRNTSISTAYMELSSLRSEDTAVYYCARGLPGQWLEY | | (“HC”) amino acid sequence |
| | | YFDYWGQGTLVTVSS | | |
| Ab 373 | 746 | SYVLTQPPSVSVAPGKTARITCGGNNIGSKSVHWYQQKPGQAPVLVIYYDSDRPSGI | ADI-24811 | Light chain variable region |
| | | PERFSGSNSGNTATLTISRVEAGDEADYYCQVWDSSSDHPVFGGGTKVTVL | | (“LC”) amino acid sequence |
| Ab 374 | 747 | EVQLVESGGGLVQPGGSLRLSCAASGFSFSTYAMSWVRQAPGKGLEWVSAISGGG | ADI-24812 | Heavy chain variable region |
| | | GSTYYADSVKGRFTISRDNSKNTLYLQVNSLRAEDTAVYYCARGGYCSSDSCYPFDF | | (“HC”) amino acid sequence |
| | | WGQGTLVTVSS | | |
| Ab 374 | 748 | QPVLTQPPSVSVSPGQTAMITCSGDALPKQYAYWYQQKPGQAPVLVIYKDSERPS | ADI-24812 | Light chain variable region |
| | | GIPERFSGSSSGTTVTLTISGVQAEDEADYYCQSADNSGSYAVFGGGTQLTVL | | (“LC”) amino acid sequence |
| Ab 375 | 749 | EVQLLESGGGLVQPGRSLRLSCAASGFTFDDYAMHWVRQAPGKGLEWVSGISWN | ADI-24813 | Heavy chain variable region |
| | | SGSIGYADSVKGRFTISRDNAKNSLYLQMNSLRAEDTALYYCAKDGDSSSWRDSNF | | (“HC”) amino acid sequence |
| | | DYWGQGTLVTVSS | | |
| Ab 375 | 750 | QSVLTQPPSVSGAPGQRVTISCTGSSSNIGAGYDVHWYQQLPGTAPKLLIYGNSNR | ADI-24813 | Light chain variable region |
| | | PSGVPDRFSGSKSGTSASLAITGLQAEDEADYYCQSYDSSLSGVVFGGGTKLTVL | | (“LC”) amino acid sequence |
| Ab 376 | 751 | EVQLLESGGGVVQPGRSLRLSCAASGFTFNSYTMHWVRQAPGKGLEWVAVISYD | ADI-24814 | Heavy chain variable region |
| | | GSNKYYADSVKGRFTISRDNSKNTLYLQMNSLRAEDTAVYYCARGRPYDFWSGYYT | | (“HC”) amino acid sequence |
| | | DYYYYMDVWGKGTTVTVSS | | |
| Ab 376 | 752 | EIVLTQSPGTLSLSPGERATLSCRASQSVYSNYLAWYQQKPGQAPRLLIYGASSRAT | ADI-24814 | Light chain variable region |
| | | GIPDRFSGSGSGTDFTLTISRLEPEDFAVYYCQQCGSSWTFGQGTKVEIK | | (“LC”) amino acid sequence |
| Ab 377 | 753 | EVQLVESGGGLVKPGGSLRLSCAASGFTFSSYSMNWVRQAPGKGLEWVSSISSSSS | ADI-24815 | Heavy chain variable region |
| | | YIYYADSVKGRFTISRDNAKNSLYLQMNSLRAEDTAVYYCAREGYSSSSGYYYMDV | | (“HC”) amino acid sequence |
| | | WGKGTTVTVSS | | |
| Ab 377 | 754 | QSVLTQPPSVSGAPGQRVTISCTGSSSNIGAGYDVHWYQQLPGTAPKLLIYGNSNR | ADI-24815 | Light chain variable region |
| | | PSGVPDRFSGSKSGTSASLAITGLQAEDEADYYCQSYDSSLSGSVFGIGTKVTVL | | (“LC”) amino acid sequence |
| Ab 378 | 755 | QVQLVQSGAEVKKPGASVKVSCKASGYTFTSYDINWVRQATGQGLEWMGWMN | ADI-24816 | Heavy chain variable region |
| | | PNSGNTGYAQKFQGRVTMTRNTSISTAYMELSSLRSEDTAVYYCARGIPGYYYYGM | | (“HC”) amino acid sequence |
| | | DVWGQGTTVTVSS | | |
| Ab 378 | 756 | SYELTQPPSVSVSPGQTASITCSGDKLGDKYACWYQQKPGQSPVLVIYQDSKRPSGI | ADI-24816 | Light chain variable region |
| | | PERFSGSNSGNTATLTISGTQAMDEADYYCQAWDSSTYVFGIGTKVTVL | | (“LC”) amino acid sequence |
| Ab 379 | 757 | EVQLVESGGGLVKPGGSLRLSCAASGFTFSSYSMNWVRQAPGKGLEWVSSISSSSS | ADI-24817 | Heavy chain variable region |
| | | YIYYADSVKGRFTISRDNAKNSLYLQMNSLRAEDTAVYYCARDSMALLYSNYWFDP | | (“HC”) amino acid sequence |
| | | WGQGTLVTVSS | | |
| Ab 379 | 758 | QSVVTQPPSVSGAPGQRVTISCTGSSSNIGAGYDVHWYQQLPGTAPKLLIYGNSNR | ADI-24817 | Light chain variable region |
| | | PSGVPDRFSGSKSGTSASLAITGLQAEDEADYYCQSYDSSLSGSVFGGGTKLTVL | | (“LC”) amino acid sequence |
| Ab 380 | 759 | QVQLVQSGAEVKKPGASVKVSCKASGYTFTGYYMHWVRQAPGQGLEWMGWIN | ADI-24818 | Heavy chain variable region |
| | | PNSGGTNYAQKFQGRVTMTRDTSISTAYMELSRLRSDDTAVYYCARGGTGVEFDY | | (“HC”) amino acid sequence |
| | | WGQGTLVTVSS | | |
| Ab 380 | 760 | QPVLTQPASVSGSPGQSITISCTGTSSDVGGYNYVSWYQQHPGKAPKLMIYDVSNR | ADI-24818 | Light chain variable region |
| | | PSGVSNRFSGSKSGNTASLTISGLQAEDEADYYCSSYTSSSTLVFGGGTQLTVL | | (“LC”) amino acid sequence |
| Ab 381 | 761 | EVQLLESGGGLVKPGGSLRLSCAASGFTFSSYSMNWVRQAPGKGLEWVSSISSSSS | ADI-24819 | Heavy chain variable region |
| | | YIYYADSVKGRFTISRDNAKNSLYLQMNSLRAEDTAVYYCARESGSGWYYFDYWG | | (“HC”) amino acid sequence |
| | | QGTLVTVSS | | |
| Ab 381 | 762 | QSVLTQPPSVSGAPGQRVTISCTGSSSNIGAGYDVHWYQQLPGTAPKLLIYGNSNR | ADI-24819 | Light chain variable region |
| | | PSGVPDRFSGSKSGTSASLAITGLQAEDEADYYCQSYDGSLSGVFGGGTKVTVL | | (“LC”) amino acid sequence |
| Ab 382 | 763 | QVQLVQSGAEVKKPGSSVKVSCKASGGTFSSYTISWVRQAPGQGLEWMGRIIPILG | ADI-24820 | Heavy chain variable region |
| | | IANYAQKFQGRVTITADKSTSTAYMELSSLRSEDTAVYYCARDPPYLRAFDIWGQGT | | (“HC”) amino acid sequence |
| | | TVTVSS | | |
| Ab 382 | 764 | ETTLIQSPSSLSASVGDRVTITCRASQSISSYLNWYQQKPGKAPKLLIYAASSLQSGV | ADI-24820 | Light chain variable region |
| | | PSRFSGSGSGTDFTLTISSLQPEDFATYYCQQSYSTPLLTFGGGTKVEIK | | (“LC”) amino acid sequence |
| Ab 383 | 765 | EVQLVESGGGLVQPGRSLRLSCAASGFTFDDYAMHWVRQAPGKGLEWVSGISW | ADI-24821 | Heavy chain variable region |
| | | NSGSIGYADSVKGRFTISRDNAKNSLYLQMNSLRAEDTALYYCAKDKDNWNYDAF | | (“HC”) amino acid sequence |
| | | DIWGQGTMVTVSS | | |
| Ab 383 | 766 | SYELTQPPSASGTPGQRVTISCSGSSSNIGSNTVNWYQQLPGTAPKLLIYSNNQRPS | ADI-24821 | Light chain variable region |
| | | GVPDRFSGSKSGTSASLAISGLQSEDEADYYCAAWDDSLNGPVFGGGTKLTVL | | (“LC”) amino acid sequence |
| Ab 384 | 767 | QVQLVESGGGLVKPGGSLRLSCAASGFTFSSYSMNWVRQAPGKGLEWVSSISSSSS | ADI-24822 | Heavy chain variable region |
| | | YIYYADSVKGRFTISRDNAKNSLYLQMNSLRAEDTAVYYCARDSGLGSRGDAFDIW | | (“HC”) amino acid sequence |
| | | GQGTMVTVSS | | |
| Ab 384 | 768 | QSVLTQPPSVSGAPGQRVTISCTGSSSNIGAGYDVHWYQQLPGTAPKLLIYGNSNR | ADI-24822 | Light chain variable region |
| | | PSGVPDRFSGSKSGTSASLAITGLQAEDEADYYCQSYDSSLSGYVFGIGTKVTVL | | (“LC”) amino acid sequence |
| Ab 385 | 769 | EVQLLESGGGLVKPGGSLRLSCAASGFTFSSYSMNWVRQAPGKGLEWVSSISSSSS | ADI-24823 | Heavy chain variable region |
| | | YIYYADSVKGRFTISRDNAKNSLYLQMNSLRAEDTAVYYCAREGDYYGSGRPFDYW | | (“HC”) amino acid sequence |
| | | GQGTLVTVSS | | |
| Ab 385 | 770 | QSVVTQPPSVSGAPGQRVTISCTGSSSNIGAGYDVHWYQQLPGTAPKLLIYGNSNR | ADI-24823 | Light chain variable region |
| | | PSGVPDRFSGSKSGTSASLAITGLQAEDEADYYCQSYDSSLSVVFGGGTKLTVL | | (“LC”) amino acid sequence |
| Ab 386 | 771 | QVQLQESGPGLVKPSETLSLTCTVSGGSISSYYWSWIRQPPGKGLEWIGYIYYSGST | ADI-24824 | Heavy chain variable region |
| | | NYNPSLKSRVTISVDTSKNQFSLKLSSVTAADTAVYYCAISLYGDYRTDAFDIWGQGT | | (“HC”) amino acid sequence |
| | | TVTVSS | | |
| Ab 386 | 772 | EIVLTQSPSSFSASTGDRVTITCRASQGISSYLAWYQQKPGKAPKLLIYAASTLQSGVP | ADI-24824 | Light chain variable region |
| | | SRFSGSGSGTDFTLTISCLQSEDFATYYCQQYYSYPLFGGGTKVEIK | | (“LC”) amino acid sequence |
| Ab 387 | 773 | QVQLVQSGAEVKKPGASVKVSCKASGYTFTSYDINWVRQATGQGLEWMGWMN | ADI-24825 | Heavy chain variable region |
| | | PNSGNTGYAQKFQGRVTMTRNTSISTAYMELSSLRSEDTAVYYCSSVGGYYYYGM | | (“HC”) amino acid sequence |
| | | DVWGQGTTVTVSS | | |
| Ab 387 | 774 | EIVMTQSPLSLPVTPGEPASISCRSSQSLLHSNGYNYLDWYLQKPGQSPQLLIYLGSN | ADI-24825 | Light chain variable region |
| | | RASGVPDRFSGSGSGTDFTLKISRVEAEDVGVYYCMQALQTLYTFGQGTKVEIK | | (“LC”) amino acid sequence |
| Ab 388 | 775 | EVQLVESGGGLVKPGGSLRLSCAASGFTFSSYSMNWVRQAPGKGLEWVSSISSSSS | ADI-24826 | Heavy chain variable region |
| | | YIYYADSVKGRFTISRDNAKNSLYLQMNSLRAEDTAVYYCARDRGYGSGALDYWG | | (“HC”) amino acid sequence |
| | | QGTLVTVSS | | |
| Ab 388 | 776 | QPVLTQPASVSGSPGQSITISCTGTSSDVGGYNYVSWYQQHPGKAPKLMIYDVSNR | ADI-24826 | Light chain variable region |
| | | PSGVSNRFSGSKSGNTASLTISGLQAEDEADYYCSSYTSSSTVVFGGGTKLTVL | | (“LC”) amino acid sequence |
| Ab 389 | 777 | EVQLVESGGGLVQPGGSLRLSCAASGFTVSSNYMSWVRQAPGKGLEWVSVIYSDG | ADI-24827 | Heavy chain variable region |
| | | STYYADSVKGRFTISRHNSKNTLYLQMNSLRAEDTAVYYCARCSTYGDYIDWYFDL | | (“HC”) amino acid sequence |
| | | WGRGTLVTVSS | | |
| Ab 389 | 778 | ETTLTQSPATLSVSPGERATLSCRASQSVSSNLAWYQQKPGQAPRLLIYGASTRATG | ADI-24827 | Light chain variable region |
| | | IPARFSGSGSGTEFTLTISSLQSEDFAVYYCQQYNNWPLSFGGGTKLEIK | | (“LC”) amino acid sequence |
| Ab 390 | 779 | EVQLVESGGGLVKPGGSLRLACAASGFSFRSYRMNWVRQAPGKGLEWVSSISSSSS | ADI-24828 | Heavy chain variable region |
| | | YIDYADSVKGRFTISRDNAKNTVYLQVNSLRAEDTAVYYCARDGRTIFGVVIDYWG | | (“HC”) amino acid sequence |
| | | QGTLVTVSS | | |
| Ab 390 | 780 | QSVLTQPPSVSGAPGQRVTISCTGSSSNIGAGYDVHWYQQLPGTAPKLLIYGNNNR | ADI-24828 | Light chain variable region |
| | | PSGVPDRFSGSKSGTSASLVITGLQAEDEADYYCQSYDSSLSVVFGGGTKLTVL | | (“LC”) amino acid sequence |
| Ab 391 | 781 | EVQLLESGGGLVKPGGSLRLSCAASGFTFSSYSMNWVRQAPGKGLEWVSSISSSSS | ADI-24829 | Heavy chain variable region |
| | | YIYYADSVKGRFTISRDNAKNSLYLQMNSLRAEDTAVYYCARGFHYYGSGSHDAFDI | | (“HC”) amino acid sequence |
| | | WGQGTMVTVSS | | |
| Ab 391 | 782 | QPVLTQPPSVSGAPGQRVTISCTGSSSNIGAGYDVHWYQQLPGTAPKLLIYGNSNR | ADI-24829 | Light chain variable region |
| | | PSGVPDRFSGSKSGTSASLAITGLQAEDEADYYCQSYDSSLSGVFGGGTKLTVL | | (“LC”) amino acid sequence |
| Ab 392 | 783 | QVQLVQSGAEVKKPGSSVKVSCKASGGTFSSYAISWVRQAPGQGLEWMGGIIPIF | ADI-24830 | Heavy chain variable region |
| | | GTANYAQKFQGRVTITADESTSTAYMELSSLRSEDTAVYYCARGGSMVRGLGFDP | | (“HC”) amino acid sequence |
| | | WGQGTLVTVSS | | |
| Ab 392 | 784 | DIQLTQSPLSLPVTPGEPASISCRSSQSLLHSNGYNYLDWYLQKPGQSPQLLIYLGSN | ADI-24830 | Light chain variable region |
| | | RASGVPDRFSGSGSGTDFTLKISRVEAEDVGVYYCMQALQTPLTFGGGTKLEIK | | (“LC”) amino acid sequence |
| Ab 393 | 785 | QVQLVESGGGLVKPGGSLRLSCAASGFTFSSYSMNWVRQAPGKGLEWVSSISSSSS | ADI-24831 | Heavy chain variable region |
| | | YIYYADSVKGRFTISRDNAKNSLYLQMNSLRAEDTAVYYCARVPSDFWSGYYNDYW | | (“HC”) amino acid sequence |
| | | GQGTLVTVSS | | |
| Ab 393 | 786 | QSVLTQPPSVSGAPGQRVTISCTGSSSNIGAGYDVHWYQQLPGTAPKLLIYGNSNR | ADI-24831 | Light chain variable region |
| | | PSGVPDRFSGSKSGTSASLAITGLQAEDEADYYCQSYDSSLSGSWVFGGGTKLTVL | | (“LC”) amino acid sequence |
| Ab 394 | 787 | EVQLVESGGGLVKPGGSLRLSCAASGFTFSSYSMNWVRQAPGKGLEWVSSISASSS | ADI-24832 | Heavy chain variable region |
| | | YIFYSDLVKGRFTISRDNAKNSLYLQMNSLRAEDTAVYYCARAGYYYGSGSYYVDYW | | (“HC”) amino acid sequence |
| | | GQGTLVTVSS | | |
| Ab 394 | 788 | QSVLTQPPSVSGAPGQRVAISCTGSSSNIGAGYDVHWYQQLPGTAPKLLIYGNSNR | ADI-24832 | Light chain variable region |
| | | PSGVPDRFSGSKSGTSASLAITGLQAEDEADYYCQSYGSSLSGWVFGGGTKLTVL | | (“LC”) amino acid sequence |
| Ab 395 | 789 | QVQLVESGGGLVKPGGSLRLSCAASGFTFSSYSMNWVRQAPGKGLEWVSSISSSSS | ADI-24833 | Heavy chain variable region |
| | | YIYYADSVKGRFTISRDNAKNSLYLQMNSLRAEDTAVYYCARALTYYYDSSGHGADY | | (“HC”) amino acid sequence |
| | | WGQGTLVTVSS | | |
| Ab 395 | 790 | QSVVTQPPSVSGAPGQRVTISCTGSSSNIGAGYDVHWYQQLPGTAPKLLIYGNSNR | ADI-24833 | Light chain variable region |
| | | PSGVPDRFSGSKSGTSASLAITGLQAEDEADYYCQSYDSSLSVVFGGGTKLTVL | | (“LC”) amino acid sequence |
| Ab 396 | 791 | QVQLVQSGGGLVQPGGSLRLSCAASGFTFSSYAMSWVRQAPGKGLEWVSTISGS | ADI-24834 | Heavy chain variable region |
| | | GGSTYYADSVKGRFTISRDNSKNTLYLQMNSLRAEDTAVYYCATWKRWGSGYYYS | | (“HC”) amino acid sequence |
| | | YMDVWGKGTTVTVSS | | |
| Ab 396 | 792 | DIQLTQSPSTLSASVGDRVTITCRASQSISSWLAWYQQKPGKAPKLLIYDAFSLESGV | ADI-24834 | Light chain variable region |
| | | PSRFSGSGSGTEFTLTISSLQPDDFATYYCQQYNSYSVTFGGGTKVEIK | | (“LC”) amino acid sequence |
| Ab 397 | 793 | EVQLVESGGGLVKPGGSLRLSCAASGFPFSTSSMNWVRQAPGKGLEWVSSISSSSS | ADI-24835 | Heavy chain variable region |
| | | YIDYADSVKGRFTISRDNAKNSLYLQMNSLRAGDTAVYYCARVPRSDWYYFDYWG | | (“HC”) amino acid sequence |
| | | QGTLVTVSS | | |
| Ab 397 | 794 | QSVVTQPPSVSGAPGQRVTISCTGSSSNIGAGYDVHWYQQLPGTAPKFLIYDNKYR | ADI-24835 | Light chain variable region |
| | | PSGVPDRFSGSKSGTSASLAITGLQAEDEADYYCQSYDSSLSGYVFGTGTKLTVL | | (“LC”) amino acid sequence |
| Ab 398 | 795 | EVQLLESGGGLVQPGRSLRLSCAASGFTFDDYAMHWVRQAPGKGLEWVSGISWN | ADI-24836 | Heavy chain variable region |
| | | SGSIGYADSVKGRFTISRDNAKNSLYLQMNSLRAEDTALYYCAKDLRGGTYYYYGM | | (“HC”) amino acid sequence |
| | | DVWGQGTTVTVSS | | |
| Ab 398 | 796 | DIRVTQSPSSLSASVGDRVTITCRASQSISSYLNWYQQKPGKAPKLLIYAASSLQSGV | ADI-24836 | Light chain variable region |
| | | PSRFSGSGSGTDFTLTISSLQPEDFATYYCQQSYSTPPTFGGGTKVEIK | | (“LC”) amino acid sequence |
| Ab 399 | 797 | QVQLQESGPGLVKPSETLSLTCTVSGGSISSYYWSWIRQPPGKGLEWIGYIYYSGST | ADI-24837 | Heavy chain variable region |
| | | NYNPSLKSRVTISVDTSKNQFSLKLSSVTAADTAVYYCARAIYYYDSSGYYYVGDAFDI | | (“HC”) amino acid sequence |
| | | WGQGTTVTVSS | | |
| Ab 399 | 798 | QSVLTQPPSVSAAPGQKVTISCSGSSSNIGNNYVSWYQQLPGTAPKLLIYENNKRPS | ADI-24837 | Light chain variable region |
| | | GIPDRFSGSKSGTSATLGITGLQTGDEADYYCGTWDSSLSAGVFGGGTKLTVL | | (“LC”) amino acid sequence |
| Ab 400 | 799 | EVQLLESGGGLVKPGGSLRLSCAASGFTFSSYSMNWVRQAPGKGLEWVSSISSSSS | ADI-24838 | Heavy chain variable region |
| | | YIYYADSVKGRFTISRDNAKNSLYLQMNSLRAEDTAVYYCARQGVGTVTTWNYYYY | | (“HC”) amino acid sequence |
| | | YMDVWGKGTTVTVSS | | |
| Ab 400 | 800 | QSVVTQPPSVSGAPGQRVTISCTGSSSNIGAGYDVHWYQQLPGTAPKLLIYGNSNR | ADI-24838 | Light chain variable region |
| | | PSGVPDRFSGSKSGTSASLAITGLQAEDEADYYCQSYDSSLSWVFGGGTKLTVL | | (“LC”) amino acid sequence |
| Ab 401 | 801 | EVQLVESGGGLVKPGGSLRLSCAASGFTFSSYSMNWVRQAPGKGLEWVSSISSSSS | ADI-24839 | Heavy chain variable region |
| | | YIYYADSVKGRFTISRDNAKNSLYLQMNSLRAEDTAVYYCARVLVATAYGNAFDIW | | (“HC”) amino acid sequence |
| | | GQGTMVTVSS | | |
| Ab 401 | 802 | QSVLTQPPSVSGAPGQRVTISCTGSSSNIGAGYDVHWYQQLPGTAPKLLIYGNSNR | ADI-24839 | Light chain variable region |
| | | PSGVPDRFSGSKSGTSASLAITGLQAEDEADYYCQSYDSSLTVVFGGGTKLTVL | | (“LC”) amino acid sequence |
| Ab 402 | 803 | EVQLLESGGGLVKPGGSLRLSCAASGFTFSSYSMNWVRQAPGKGLEWVSSISSSSS | ADI-24840 | Heavy chain variable region |
| | | YIYYADSVKGRFTISRDNAKNSLYLQMNSLRAEDTAVYYCARDQVYSYGYYFDYWG | | (“HC”) amino acid sequence |
| | | QGTLVTVSS | | |
| Ab 402 | 804 | QSVLAQPPSVSGAPGQRVTISCTGSSSNIGAGYDVHWYQQLPGTAPKLLIYGNSNR | ADI-24840 | Light chain variable region |
| | | PSGVPDRFSGSKSGTSASLAITGLQAEDEADYYCQSYDSSLSGSHVVFGGGTKLTVL | | (“LC”) amino acid sequence |
| Ab 403 | 805 | QVQLVQSGAEVKKPGASVKVSCKASGYTFTSYAMHWVRQAPGQRLEWMGWIN | ADI-24841 | Heavy chain variable region |
| | | AGNGNTKYSQKFQGRVTITRDTSASTAYMELSSLRSEDTAVYYCARDGFPTNYDFW | | (“HC”) amino acid sequence |
| | | SGYSDDAFDIWGQGTMVTVSS | | |
| Ab 403 | 806 | DIVMTQSPATLSVSPGERATLSCRASQSVSSNLAWYQQKPGQAPRLLIYGASTRAT | ADI-24841 | Light chain variable region |
| | | GIPARFSGSGSGTEFTLTISSLQSEDFAVYYCQQYNNWPPLTFGQGTKVDIK | | (“LC”) amino acid sequence |
| Ab 404 | 807 | QVQLVQSGGGLVKPGGSLRLSCAASGFTFSSYSMNWVRQAPGKGLEWVSSISSSS | ADI-24842 | Heavy chain variable region |
| | | SYIYYADSVKGRFTISRDNAKNSLYLQMNSLRAEDTAVYYCARVPPHDYGGYYFDY | | (“HC”) amino acid sequence |
| | | WGQGTLVTVSS | | |
| Ab 404 | 808 | QSVVTQPPSVSGAPGQRVTISCTGSSSNIGAGYDVHWYQQLPGTAPKLLIYRNSNR | ADI-24842 | Light chain variable region |
| | | PSGVPDRFSGSKSGTSASLAIIGLQAEDEADYYCQSYDSSLSVVFGGGTKLTVL | | (“LC”) amino acid sequence |
| Ab 405 | 809 | EVQLVESGPGLVKPSQTLSLTCTVSGGSISSGDYYWSWIRQPPGKGLEWIGYIYYSG | ADI-24843 | Heavy chain variable region |
| | | STYYNPSLKSRVTISVDTSKNQFSLKLSSVTAADTAVYYCARESIVGAVDYWGQGTL | | (“HC”) amino acid sequence |
| | | VTVSS | | |
| Ab 405 | 810 | DIQMTQSPDSLAVSLGERATINCKSSQSVLYSSNNKNYLAWYQQKPGQPPKLLIYW | ADI-24843 | Light chain variable region |
| | | ASTRESGVPDRFSGSGSGTDFTLTISSLQAEDVAVYYCQQYYSTPHTFGQGTKLEIK | | (“LC”) amino acid sequence |
| Ab 406 | 811 | EVQLVESGGGLVKPGGSLRLSCAASGFTFSSYSMNWVRQAPGKGLEWVSSISSSSS | ADI-24845 | Heavy chain variable region |
| | | YIYYADSVKGRFTISRDNAKNSLYLQMNSLRAEDTAVYYCARDYCSGGSCYLAAFDI | | (“HC”) amino acid sequence |
| | | WGQGTTVTVSS | | |
| Ab 406 | 812 | QPVLTQPASVSGSPGQSITISCTGTSSDVGGYNYVSWYQQHPGKAPKLMIYEVSNR | ADI-24845 | Light chain variable region |
| | | PSGVSNRFSGSKSGNTASLTISGLQAEDEADYYCSSYTSSSTPVVFGGGTKLTVL | | (“LC”) amino acid sequence |
| Ab 407 | 813 | EVQLLESGGGLVKPGGSLRLSCAASGFTFSSYSMNWVRQAPGKGLEWVSSISSSSS | ADI-24846 | Heavy chain variable region |
| | | YIYYADSVKGRFTISRDNAKNSLYLQMNSLRAEDTAVYYCARDDGILWLDYWGQG | | (“HC”) amino acid sequence |
| | | TLVTVSS | | |
| Ab 407 | 814 | QPGLTQPPSASGTPGQRVTISCSGSSSNIGSNYVYWYQQLPGTAPKLLIYRNNQRPS | ADI-24846 | Light chain variable region |
| | | GVPDRFSGSKSGTSASLAISGLRSEDEADYYCAAWDDSLSGQVFGGGTKLTVL | | (“LC”) amino acid sequence |
| Ab 408 | 815 | EVQLVESGGGLVKPGGSLRLSCAASGFTFSSYSMNWVRQAPGKGLEWVSSISSSSN | ADI-24847 | Heavy chain variable region |
| | | YIYYADSVKGRFTISRDNAKNSLYLQMNSLRAEDTAVYYCARDRIAAYTFDYWGQG | | (“HC”) amino acid sequence |
| | | TLVTVSS | | |
| Ab 408 | 816 | QSVVTQPPSVSGAPGQRVTISCTGSSSNIGAGYDVHWYQQLPGTAPKLLIYGNSNR | ADI-24847 | Light chain variable region |
| | | PSGVPDRFSGSKSGTSASLAITGLQAEDEADYYCQSYDSSLPYVFGTGTKVTVL | | (“LC”) amino acid sequence |
| Ab 409 | 817 | EVQLVESGGGLVKPGGSLRLSCAASGFTFSSYSMNWVRQAPGKGLEWVSSISSSSS | ADI-24848 | Heavy chain variable region |
| | | YIYYADSVKGRFTISRDNAKNSLYLQMNSLRAEDTAVYYCARDTVVAGIYFDYWGQ | | (“HC”) amino acid sequence |
| | | GTLVTVSS | | |
| Ab 409 | 818 | QSVLTQPPSVSGAPGQRVTISCTGSSSNIGAGYDVHWYQQLPGTAPKLLIYGNSNR | ADI-24848 | Light chain variable region |
| | | PSGVPDRFSGSKSGTSASLAITGLQAEDEADYYCQSYDSSLSGVVFGGGTKLTVL | | (“LC”) amino acid sequence |
| Ab 410 | 819 | QVQLVQSGGVVVQPGGSLRLSCAASGFTFDDYTMHWVRQAPGKGLEWVSLIGW | ADI-24849 | Heavy chain variable region |
| | | DGGSTYYADSVKGRFTISRDNSKYSLYLQMNSLRTEDTALYYCAKDLGSSSGYFLGR | | (“HC”) amino acid sequence |
| | | DYYGMDVWGQGTTVTVSS | | |
| Ab 410 | 820 | DIQLTQSPSSLSASVGDRVTITCQASQDISNYLNWYQQKPGKAPKLLIYDASNLETG | ADI-24849 | Light chain variable region |
| | | VPSRFSGSGSGTDFTFTISSLQPEDIATYYCQQYNNLPTFGGGTKLEIK | | (“LC”) amino acid sequence |
| Ab 411 | 821 | QVQLVQSGGGLVKPGGSLRLSCAASGFTFSSYSMNWVRQAPGKGLEWVSSISSSS | ADI-24850 | Heavy chain variable region |
| | | SYIYYADSVKGRFTISRDNAKNSLYLQMNSLRAEDTAVYYCAREDYGDYYYYYMDV | | (“HC”) amino acid sequence |
| | | WGKGTTVTVSS | | |
| Ab 411 | 822 | QPVLTQPPSVSGAPGQRVTISCTGSSSNIGAGYDVHWYQQLPGTAPKLLIYGNSNR | ADI-24850 | Light chain variable region |
| | | PSGVPDRFSGSKSGTSASLAITGLQAEDEADYYCQSYDSSLSGYVFGTGTKVTVL | | (“LC”) amino acid sequence |
| Ab 412 | 823 | QVQLVQSGAEVKKPGASVKVSCKASGYTFTGYYMHWVRQAPGQGLEWMGWIN | ADI-24851 | Heavy chain variable region |
| | | PNSGGTNYAQKFQGRVTMTRDTSISTAYMELSRLRSDDTAVYYCARAYELELDYW | | (“HC”) amino acid sequence |
| | | GQGTLVTVSS | | |
| Ab 412 | 824 | QSVLIQPPSASGSPGQSVTISCTGTSSDVGGYNYVSWYQQHPGKAPKLMIYEVSKR | ADI-24851 | Light chain variable region |
| | | PSGVPDRFSGSKSGNTASLIVSGLQAEDEADYYCSSYAGSNNVVTGGGTKLTVL | | (“LC”) amino acid sequence |
| Ab 413 | 825 | QVQLVESGAEVKKPGASVKVSCKASGYTFTSYAIHWVRQAPGQRLEWMGWINAG | ADI-24852 | Heavy chain variable region |
| | | NGNTKYSQKFQGRVTITRDTSASTAYMELSSLRSEDTAVYYCASEESGYFDYWGQG | | (“HC”) amino acid sequence |
| | | TLVTVSS | | |
| Ab 413 | 826 | SYELMQPPSVPVSPGQTASITCSGDKLGDKYACWYQQKPGQSPVLVIYQDRKRPS | ADI-24852 | Light chain variable region |
| | | GIPERFSGSNSGNTATLTISGTQAMDEADYYCQAWDSSTVVFGGGTKVTVL | | (“LC”) amino acid sequence |
| Ab 414 | 827 | EVQLVESGGGLVKPGGSLRLSCAASGFTFSSYSMNWVRQAPGKGLEWVSSISSSSS | ADI-24854 | Heavy chain variable region |
| | | YIYYADSVKGRFTISRDNAKNSLYLQMNSLRAEDTAVYYCARDRRFGELFYFDYWG | | (“HC”) amino acid sequence |
| | | QGTLVTVSS | | |
| Ab 414 | 828 | QSVLTQPPSVSGAPGQRVTISCTGSSSNIGAGYDVHWYQQLPGTAPKLLIYGNSNR | ADI-24854 | Light chain variable region |
| | | PSGVPDRFSGSKSGTSASLAITGLQAEDEADYYCQSYDSSLSGNWVFGGGTKLTVL | | (“LC”) amino acid sequence |
| Ab 415 | 829 | EVQLVESGGGLVKPGGSLRLSCAASGFTFSSYSMNWVRQAPGKGLEWVSSISSSSS | ADI-24855 | Heavy chain variable region |
| | | YIYYADSVKGRFTISRDNAKNSLYLQMNSLRAEDTAVYYCARRYCTNGVCYDAFDI | | (“HC”) amino acid sequence |
| | | WGQGTMVTVSS | | |
| Ab 415 | 830 | QSVVTQPPSVSGAPGQRVTISCTGSSSNIGAGYDVHWYQQLPGTAPKLLIYGNSNR | ADI-24855 | Light chain variable region |
| | | PSGVPDRFSGSKSGTSASLAITGLQAEDEADYYCQSYDSSLSYVFGTGTKVTVL | | (“LC”) amino acid sequence |
| Ab 416 | 831 | QVQLVQSGAEVKKPGASVKVSCKASGYTFTSYGISWVRQAPGQGLEWMGWISAY | ADI-24856 | Heavy chain variable region |
| | | NGNTNYAQKLQGRVTMTTDTSTSTAYMELRSLRSDDTAVYYCARAGIVVVPKYYYY | | (“HC”) amino acid sequence |
| | | MDVWGKGTTVTVSS | | |
| Ab 416 | 832 | DIVMTQSPGTLSLSPGERATLSCRASQSVSSSYLAWYQQKPGQAPRLLIYGASSRAT | ADI-24856 | Light chain variable region |
| | | GIPDRFSGSGSGTDFTLTISRLEPEDFAVYYCQQYGSSPMYTFGQGTKVEIK | | (“LC”) amino acid sequence |
| Ab 417 | 833 | EVQLLESGGGLVKPGGSLRLSCAASGFTFSSYSMNWVRQAPGKGLEWVSSISSSSS | ADI-24857 | Heavy chain variable region |
| | | YIYYADSVKGRFTISRDNAKNSLYLQMNSLRAEDTAVYYCAREGYYYGSGSYLDYW | | (“HC”) amino acid sequence |
| | | GQGTLVTVSS | | |
| Ab 417 | 834 | QSVVTQPPSVSGAPGQRVTISCTGSSSNIGAGYDVHWYQQLPGTAPKLLIYGNSNR | ADI-24857 | Light chain variable region |
| | | PSGVPDRFSGSKSGTSASLAITGLQAEDEADYYCQSYDSSLSVVFGGGTKLTVL | | (“LC”) amino acid sequence |
| Ab 418 | 835 | EVQLLESGGGLVKPGGSLRLSCAASGFTFSSYSMNWVRQAPGKGLEWVSSISSSSS | ADI-24858 | Heavy chain variable region |
| | | YIYYADSVKGRFTISRDNAKNSLYLQMNSLRAEDTAVYYCARGGYSYGYSFDYWGQ | | (“HC”) amino acid sequence |
| | | GTLVTVSS | | |
| Ab 418 | 836 | QSVLTQPPSVSGAPGQRVTISCTGSSSNIGAGYDVHWYQQLPGTAPKLLIYGNSNR | ADI-24858 | Light chain variable region |
| | | PSGVPDRFSGSKSGTSASLAITGLQAEDEADYYCQSYDSSLSVVFGGGTKLTVL | | (“LC”) amino acid sequence |
| Ab 419 | 837 | EVQLLESGGGLVKPGGSLRLSCAASGFTFSSYSMNWVRQAPGKGLEWVSSISSSSS | ADI-24859 | Heavy chain variable region |
| | | YIYYADSVKGRFTISRDNAKNSLYLQMNSLRAEDTAVYYCARDGSPINWVSPFPFDY | | (“HC”) amino acid sequence |
| | | WGQGTLVTVSS | | |
| Ab 419 | 838 | QPVLTQPPSVSGAPGQRVTISCTGSSSNIGAGYDVHWYQQLPGTAPKLLIYGNSNR | ADI-24859 | Light chain variable region |
| | | PSGVPDRFSGSKSGTSASLAITGLQAEDEADYYCQSYDSSLSGSVFGGGTQLTVL | | (“LC”) amino acid sequence |
| Ab 420 | 839 | EVQLLESGGGLVKPGGSLRLSCAASGLTFSDYYMSWIRQAPGKGLEWVSYISGGSS | ADI-24860 | Heavy chain variable region |
| | | YSNYADSVKGRFTISRDNAKNSLYLQMNSLRAEDTAVYYCARGYCSGSSCYEAFDI | | (“HC”) amino acid sequence |
| | | WGQGTTVTVSS | | |
| Ab 420 | 840 | SYVLTQPPSVSGAPGQRVTISCTGSSSNIGAGFDVHWYQQLPGTAPKLLIYGNSDRP | ADI-24860 | Light chain variable region |
| | | SGVPDRFSGSKSGTSASLAITGLQAEDEADYYCQSYDSSLSGYVFGTGTKVTVL | | (“LC”) amino acid sequence |
| Ab 421 | 841 | QVQLVQSGGGLVKPGGSLRLSCAASGFTFSSYSMNWVRQAPGKGLEWVSSISGGS | ADI-24861 | Heavy chain variable region |
| | | SYIYYADSVKGRFTISRDNAKNSLYLQMNSLRAEDTAVYYCAREAYYYDSSGLKWFD | | (“HC”) amino acid sequence |
| | | PWGQGTLVTVSS | | |
| Ab 421 | 842 | QSVLTQPPSVSGAPGQRVTISCTGSSSNIGAGYDVHWYQQLPGTAPKLLIYGNSNR | ADI-24861 | Light chain variable region |
| | | PSGVPDRFSGSKSGTSASLAITGLQAEDEADYYCQSYDSSLGWVFGGGTKLTVL | | (“LC”) amino acid sequence |
| Ab 422 | 843 | EVQLLESGPGLVKPSQTLSLTCTVSGGSISSGGYYWSWIRQHPGKGLEWIGYIYYSG | ADI-24862 | Heavy chain variable region |
| | | STYYNPSLKSRVTISVDTSKNQFSLKLSSVTAADTAVYYCARLEIGDGSGSYLHWYFD | | (“HC”) amino acid sequence |
| | | LWGRGTLVTVSS | | |
| Ab 422 | 844 | SYELTQPPSVSVSPGQTASITCSGDKLGDKYACWYQQKPGQSPVLVIYQDSKRPSGI | ADI-24862 | Light chain variable region |
| | | PERFSGSNSGNTATLTISGTQAMDEADYYCQAWDSSTAVFGGGTKLTVL | | (“LC”) amino acid sequence |
| Ab 423 | 845 | EVQLVESGGGLVKPGGSLRLSCAASGFTFSSYSMNWVRQAPGKGLEWVSSISSSRS | ADI-24863 | Heavy chain variable region |
| | | YIYYADSVKGRFTISRDNAKNSLYLQMNSLRAEDTAVYYCARVGSGGSGTYGDYWG | | (“HC”) amino acid sequence |
| | | QGTLVTVSS | | |
| Ab 423 | 846 | QSVLTQPPSVSGAPGQRVTISCTGSSSNIGAGYDVHWYQQLPGTAPKLLIYGNSNR | ADI-24863 | Light chain variable region |
| | | PSGVPDRFSGSKSGTSASLAITGLQAEDEADYYCQSYDSSLSGWVFGGGTKLTVL | | (“LC”) amino acid sequence |
| Ab 424 | 847 | EVQLVESGGGLVKPGGSLRLSCAASGFTFSSYSMNWVRQAPGKGLEWVSSISSSSS | ADI-25462 | Heavy chain variable region |
| | | YIYYADSVKGRFTISRHNAKNSLYLQMNSLRAEDTAVYYCARGSSSSWFCFDYWGQ | | (“HC”) amino acid sequence |
| | | GTLVTVSS | | |
| Ab 424 | 848 | SYVLTQPPSVSGAPGQRVTISCTGSSSNIGAGYDVHWYQQLPGTAPKLLIYGNSNR | ADI-25462 | Light chain variable region |
| | | PSGVPDRFSGSKSGTSASLAITGLQAEDEADYYCQSYDSSLSYVFGTGTKLTVL | | (“LC”) amino acid sequence |
| Ab 425 | 849 | GVQLVESGPGLVKPSETLSLTCTVSGGSISSYYWSWIRQPPGKGLEWIGYIYYSGSTN | ADI-25467 | Heavy chain variable region |
| | | YNPSLKSRVTISVDTSKNQFSLKLSSVTAADTAVYYCARGYYYDSSGYYPNDAFDIW | | (“HC”) amino acid sequence |
| | | GQGTMVTVSS | | |
| Ab 425 | 850 | DIQVTQSPSSLSASVGDRVTITCRASQSISSYLNWYQQKPGKAPKLLIYAASSLQSGV | ADI-25467 | Light chain variable region |
| | | PSRFSGSGSGTDFTLTISSLQPEDFATYYCQQSYSTPYTFGQGTKVEIK | | (“LC”) amino acid sequence |
| Ab 426 | 851 | QVQLVQSGAEVKKPGESLKISCKGSGYSFTSYWIGWVRQMPGKGLEWMGIIYPGD | ADI-25468 | Heavy chain variable region |
| | | SDTRYSPSFQGQVTISADKSISTAYLQWSSLKASDTAMYYCARHVGQVYCSSTSCYT | | (“HC”) amino acid sequence |
| | | SREYYFDYWGQGTLVTVSS | | |
| Ab 426 | 852 | SYVLTQPPSVSVSPGQTASITCSGDKLGDKYACWYQQKPGQSPVLVIYQDSKRPSGI | ADI-25468 | Light chain variable region |
| | | PERFSGSNSGNTATLTISGTQAMDEADYYCQAWDSSTAVVFGGGTKLTVL | | (“LC”) amino acid sequence |
| Ab 427 | 853 | EVQLVESGGGLVKPGGSLRLSCAASGFTFSSYSMNWVRQAPGKGLEWVSSISSSSS | ADI-25472 | Heavy chain variable region |
| | | YIYYADSVKGRFTISRDNAKNSLYLQMNSLRAEDTAVYYCARDDSSSWYYFDYWGQ | | (“HC”) amino acid sequence |
| | | GTLVTVSS | | |
| Ab 427 | 854 | QSVLTQPPSVSGAPGQRVTISCTGSSSNIGAGYDVHWYQQLPGTAPKLLIYGNSNR | ADI-25472 | Light chain variable region |
| | | PSGVPDRFSGSKSGTSASLAITGLQAEDEADYYCQSYDSSLSGYVFGIGTKVTVL | | (“LC”) amino acid sequence |
| Ab 428 | 855 | EVQLLESGGGLVKPGGSLRLSCAASGFTFSSYSMNWVRQAPGKGLEWVSSISSSSS | ADI-25478 | Heavy chain variable region |
| | | YIYYADSVKGRFTISRDNAKNSLYLQMNSLRAEDTAVYYCARLDYSNYYYYMDVWG | | (“HC”) amino acid sequence |
| | | KGTTVTVSS | | |
| Ab 428 | 856 | QPVLTQPPSVSGAPGQRVTISCTGSSSNIGAGYDVHWYQQLPGTAPKLLIYGNSNR | ADI-25478 | Light chain variable region |
| | | PSGVPDRFSGSKSGTSASLAITGLQAEDEADYYCQSYDSSLSGYVFGTGTKLTVL | | (“LC”) amino acid sequence |
| Ab 429 | 857 | EVQLVESGGGLVKPGGSLRLSCAASGFTFSSYSMNWVRQAPGKGLEWVSSISSSSS | ADI-25479 | Heavy chain variable region |
| | | YIYYADSVKGRFTISRDNAKNSLYLQMNSLRAEDTAVYYCARGGYSYGAYYYYYMD | | (“HC”) amino acid sequence |
| | | VWGKGTTVTVSS | | |
| Ab 429 | 858 | QSVLTQPPSVSGAPGQRVTISCTGSSSNIGAGYDVHWYQQLPGTAPKLLIYGNSNR | ADI-25479 | Light chain variable region |
| | | PSGVPDRFSGSKSGTSASLAITGLQAEDEADYYCQSYDSSLSGYWVFGGGTKLTVL | | (“LC”) amino acid sequence |
| Ab 430 | 859 | EVQLVESGGGLVKPGGSLRLSCAASGFTFSSYSMNWVRQAPGKGLEWVSSISSSSS | ADI-25480 | Heavy chain variable region |
| | | YIYYADSVKGRFTISRDNAKNSLYLQMNSLRAEDTAVYYCARGGYSYGAYYYYYMD | | (“HC”) amino acid sequence |
| | | VWGKGTTVTVSS | | |
| Ab 430 | 860 | QSVLTQPPSVSGAPGQRVTISCTGSSSNIGAGYDVHWYQQLPGTAPKLLIYGNSNR | ADI-25480 | Light chain variable region |
| | | PSGVPDRFSGSKSGTSASLAITGLQAEDEADYYCQSYDSSLSGYWVFGGGTKVTVL | | (“LC”) amino acid sequence |
| Ab 431 | 861 | EVQLVESGGGLVKPGGSLRLSCAASGFTFSSYSMNWVRQAPGKGLEWVSSISSSSS | ADI-25484 | Heavy chain variable region |
| | | YIYYADSVKGRFTISRDNAKNSLYLQMNSLRAEDTAVYYCARSIAVAGTGYGMDVW | | (“HC”) amino acid sequence |
| | | GQGTTVTVSS | | |
| Ab 431 | 862 | QSVLTQPPSVSGAPGQRVTISCTGSSSNIGAGYDVHWYQQLPGTAPKLLIYGNSNR | ADI-25484 | Light chain variable region |
| | | PSGVPDRFSGSKSGTSASLAITGLQAEDEADYYCQSYDSSLSVVFGGGTKLTVL | | (“LC”) amino acid sequence |
| Ab 432 | 863 | EVQLLESGPGLVKPSQTLSLTCTVSGGSISSGGYYWSWIRQHPGKGLEWIGYIYYSG | ADI-25491 | Heavy chain variable region |
| | | STYYNPSLKSRVTISVDTSKNQFSLKLSSVTAADTAVYYCAREVVPAAIRAGYYFDYW | | (“HC”) amino acid sequence |
| | | GQGTLVTVSS | | |
| Ab 432 | 864 | SYELMQPPSVSVSPGQTASITCSGDKLGDKYACWYQQKPGQSPVLVIYQDSKRPSG | ADI-25491 | Light chain variable region |
| | | IPERFSGSNSGNTATLTISGTQAMDEADYYCQAWDSSTGGVFGTGTQLTVL | | (“LC”) amino acid sequence |
| Ab 433 | 865 | QVQLVQSGGGLVKPGGSLRLSCAASGFTFSSYSMNWVRQAPGKGLEWVSSISSSS | ADI-25495 | Heavy chain variable region |
| | | SYIYYADSVKGRFTISRDNAKNSLYLQMNSLRAEDTAVYYCARGYCTNGVCYLDAFD | | (“HC”) amino acid sequence |
| | | IWGQGTTVTVSS | | |
| Ab 433 | 866 | QSVLIQPASVSGSPGQSITISCTGTSSDVGGYNYVSWYQQHPGKAPKLMIYDVSNR | ADI-25495 | Light chain variable region |
| | | PSGVSNRFSGSKSGNTASLTISGLQAEDEADYYCSSYTSSSTPVVFGGGTKVTVL | | (“LC”) amino acid sequence |
| Ab 434 | 867 | QVQLVQSGGGLVKPGGSLRLSCAASGFTFSSYSMNWVRQAPGKGLEWVSSISSSS | ADI-25496 | Heavy chain variable region |
| | | SYIYYADSVKGRFTISRDNAKNSLYLQMNSLRAEDTAVYYCARVASEVWFFDLWGR | | (“HC”) amino acid sequence |
| | | GTLVTVSS | | |
| Ab 434 | 868 | QPVLTQPPSVSGAPGQRVTISCTGSSSNIGAGYDVHWYQQLPGTAPKLLIYGNSNR | ADI-25496 | Light chain variable region |
| | | PSGVPDRFSGSKSGTSASLAITGLQAEDEADYYCQSYDSSLSGYVFGTGTKLTVL | | (“LC”) amino acid sequence |
| Ab 435 | 869 | EVQLLESGGGLVQPGGSLRLSCAASGFTFSSYWMSWVRQAPGKGLEWVANIKQD | ADI-25497 | Heavy chain variable region |
| | | GSEKYYVDSVKGRFTISRDNAKNSLYLQMNSLRAEDTAVYYCARDGLLQYDFWSGY | | (“HC”) amino acid sequence |
| | | YDYWGQGTLVTVSS | | |
| Ab 435 | 870 | EIVLTQSPSSLSASVGDRVTITCRASQGISSWLAWYQQKPEKAPKSLIYAASSLQSGV | ADI-25497 | Light chain variable region |
| | | PSRFSGSGSGTDFTLTISSLQPEDFATYYCQQYNSYPFTFGPGTKVDIK | | (“LC”) amino acid sequence |
| Ab 436 | 871 | QVQLVQSGAEVKKPGSSVKVSCKASGGTFSSYAISWVRQAPGQGLEWMGGIIPIF | ADI-25502 | Heavy chain variable region |
| | | GTANYAQKFQGRVTITADESTSTAYMELSSLRSEDTAVYYCARDHWSNPLYYYGM | | (“HC”) amino acid sequence |
| | | DVWGQGTTVTVSS | | |
| Ab 436 | 872 | SYELTQPPSVSVSPGQTARITCSGDVLAKKYARWFQQKPGQAPVLVIYKDSERPSGI | ADI-25502 | Light chain variable region |
| | | PERFSGSSSGTTVTLTISGAQVEDEADYYCYSAADNNLGVFGGGTQLTVL | | (“LC”) amino acid sequence |
| Ab 437 | 873 | EVQLLESGAEVKKPGSSVKVSCKASGGTFSSYAISWVRQAPGQGLEWMGGIIPIFG | ADI-25503 | Heavy chain variable region |
| | | TANYAQKFQGRVTITADESTSTAYMELSSLRSEDTAVYYCARSRYSGSYYYYYGMDV | | (“HC”) amino acid sequence |
| | | WGQGTTVTVSS | | |
| Ab 437 | 874 | QPVLTQPPSVSVSPGQTASITCSGDKLGDKYACWYQQKPGQSPVLVIYQDSKRPSG | ADI-25503 | Light chain variable region |
| | | IPERFSGSNSGNTATLTISGTQAMDEADYYCQAWDSSTYVFGTGTKLTVL | | (“LC”) amino acid sequence |
| Ab 438 | 875 | EVQLVESGGGLVKPGGSLRLSCAASGFTFSSYSMNWVRQAPGKGLEWVSSISSSSS | ADI-25505 | Heavy chain variable region |
| | | YIYYADSVKGRFTISRDNAKNSLYLQMNSLRAEDTAVYYCARVVGYSGSYLDYWGQ | | (“HC”) amino acid sequence |
| | | GTLVTVSS | | |
| Ab 438 | 876 | QSVVTQPPSVSGAPGQRVTISCTGSSSNIGAGYDVHWYQQLPGTAPKLLIYGNSNR | ADI-25505 | Light chain variable region |
| | | PSGVPDRFSGSKSGTSASLAITGLQAEDEADYYCQSYDSSLSGVVFGGGTKLTVL | | (“LC”) amino acid sequence |
| Ab 439 | 877 | EVQLVQSGAEVKKPGSSVKVSCKASGGTFSSYAISWVRQAPGQGLEWMGGIIPIFG | ADI-25514 | Heavy chain variable region |
| | | TANYAQKFQGRVTITADESTSTAYMELSSLRSEDTAVYYCARSRYSGSYYYYYGMDV | | (“HC”) amino acid sequence |
| | | WGQGTTVTVSS | | |
| Ab 439 | 878 | SYELTQPPSVSVSPGQTASITCSGDKLGDKYACWYQQKPGQSPVLVIYQDSKRPSGI | ADI-25514 | Light chain variable region |
| | | PERFSGSNSGNTATLTISGTQAMDEADYYCQAWDSSTYVFGIGTKLTVL | | (“LC”) amino acid sequence |
| Ab 440 | 879 | QVQLVQSGAEVKKPGASVKVSCKASGYTFTGYYMHWVRQAPGQGLEWMGWIN | ADI-25517 | Heavy chain variable region |
| | | PNSGGTNYAQKFQGRVTMTRDTSISTAYMELSRLRSDDTAVYYCARDWAWDAFD | | (“HC”) amino acid sequence |
| | | IWGQGTMVTVSS | | |
| Ab 440 | 880 | QPGLTQPASVSGSPGQSITISCTGTSSDVGGYNYVSWYQQHPGKAPKLMIYDVSN | ADI-25517 | Light chain variable region |
| | | RPSGVSNRFSGSKSGNTASLTISGLQAEDEADYYCSSYTSSSTLVFGGGTKLTVL | | (“LC”) amino acid sequence |
| Ab 441 | 881 | EVQLVESGAEVKKPGASVKVSCKASGYTFTGYYMHWVRQAPGQGLEWMGWINP | ADI-25518 | Heavy chain variable region |
| | | NSGGTNYAQKFQGRVTMTRDTSISTAYMELSRLRSDDTAVYYCARDWAWDAFDI | | (“HC”) amino acid sequence |
| | | WGQGTMVTVSS | | |
| Ab 441 | 882 | QSVLIQPASVSGSPGQSITISCTGTSSDVGGYNYVSWYQQHPGKAPKLMIYDVSNR | ADI-25518 | Light chain variable region |
| | | PSGVSNRFSGSKSGNTASLTISGLQAEDEADYYCSSYTSSSTLVFGGGTQLTVL | | (“LC”) amino acid sequence |
| Ab 442 | 883 | EVQLLESGGGLVKPGGSLRLSCAASGFTFSSYSMNWVRQAPGKGLEWVSSISSSSS | ADI-25524 | Heavy chain variable region |
| | | YIYYADSVKGRFTISRDNAKNSLYLQMNSLRAEDTAVYYCAREWSPIVVVTNAFDIW | | (“HC”) amino acid sequence |
| | | GQGTMVTVSS | | |
| Ab 442 | 884 | QSVLTQPPSVSGAPGQRVTISCTGSSSNIGAGYDVHWYQQLPGTAPKLLIYGNSNR | ADI-25524 | Light chain variable region |
| | | PSGVPDRFSGSKSGTSASLAITGLQAEDEADYYCQSYDSSLSGWVFGGGTKVTVL | | (“LC”) amino acid sequence |
| Ab 443 | 885 | QVQLVQSGGGLVKPGGSLRLSCAASGFTFSSYSMNWVRQAPGKGLEWVSSISSSS | ADI-25532 | Heavy chain variable region |
| | | SYIYYADSVKGRFTISRDNAKNSLYLQMNSLRAEDTAVYYCARGSSSSWYYFDYWG | | (“HC”) amino acid sequence |
| | | QGTLVTVSS | | |
| Ab 443 | 886 | QSVVTQPPSVSGAPGQRVTISCTGSSSNIGAGYDVHWYQQLPGTAPKLLIYGNSNR | ADI-25532 | Light chain variable region |
| | | PSGVPDRFSGSKSGTSASLAITGLQAEDEADYYCQSYDSSLSYVFGIGTKVTVL | | (“LC”) amino acid sequence |
| Ab 444 | 887 | QVQLVQSGAEVKKPGASVKVSCKASGYTFTGYYMHWVRQAPGQGLEWMGWIN | ADI-25533 | Heavy chain variable region |
| | | PNSGGTNYAQKFQGWVTMTRDTSISTAYMELSRLRSDDTAVYYCARDANWGAFD | | (“HC”) amino acid sequence |
| | | IWGQGTMVTVSS | | |
| Ab 444 | 888 | QSVLIQPASVSGSPGQSITISCTGTSSDVGGYNYVSWYQQHPGKAPKLMIYDVSNR | ADI-25533 | Light chain variable region |
| | | PSGVSNRFSGSKSGNTASLTISGLQAEDEADYYCSSYTSSSTWVFGGGTKLTVL | | (“LC”) amino acid sequence |
| Ab 445 | 889 | EVQLVESGGGLVQPGGSLRLSCAASGFTFSSYAMSWVRQAPGKGLEWVSAISGSG | ADI-25542 | Heavy chain variable region |
| | | GSTYYADSVKGRFTISRDNSKNTLYLQMNSLRAEDTAVYYCAKDYYYDSSGYPPYGI | | (“HC”) amino acid sequence |
| | | GVWGQGTTVTVSS | | |
| Ab 445 | 890 | QTVVTQEPSFSVSPGGTVTLTCGLSSGSVSTSYYPSWYQQTPGQAPRTLIYSTNTRS | ADI-25542 | Light chain variable region |
| | | SGVPDRFSGSILGNKAALTITGAQADDESDYYCVLYMGSGIWVFGGGTKVTVL | | (“LC”) amino acid sequence |
| Ab 446 | 891 | EVQLLESGGGLIQPGGSLRLSCAASGFTVSSNYMSWVRQAPGKGLEWVSVIYSGGS | ADI-25547 | Heavy chain variable region |
| | | TYYADSVKGRFTISRDNSKNTLYLQMNSLRAEDTAVYYCARGGIADAFDIWGQGT | | (“HC”) amino acid sequence |
| | | MVTVSS | | |
| Ab 446 | 892 | ETTLTQSPSSVSASVGDRVTITCRASQGISSWLAWYQQKPGKAPKLLIYAASSLQSG | ADI-25547 | Light chain variable region |
| | | VPSRFSGSGSGTDFTLTISSLQPEDFATYYCQQANSFPRTFGQGTKLEIK | | (“LC”) amino acid sequence |
| Ab 447 | 893 | EVQLVESGGGLIQPGGSLRLSCAASGFTVSSNYMSWVRQAPGKGLEWVSVIYSGG | ADI-25548 | Heavy chain variable region |
| | | STYYADSVKGRFTISRDNSKNTLYLQMNSLRAEDTAVYYCARGPQFGVSYSSGWYS | | (“HC”) amino acid sequence |
| | | FDYWGQGTLVTVSS | | |
| Ab 447 | 894 | QSVLIQPRSVSGSPGQSVTISCTGTSSDVGGYNYVSWYQQHPGKAPKLMIYDVSKR | ADI-25548 | Light chain variable region |
| | | PSGVPDRFSGSKSGNTASLTISGLQAEDEADYYCCSYAGSYTFVVFGGGTKLTVL | | (“LC”) amino acid sequence |
| Ab 448 | 895 | QVQLVQSGGGLVKPGGSLRLSCAASGFTFSSYSMNWVRQAPGKGLEWVSSISSSS | ADI-25549 | Heavy chain variable region |
| | | SYIYYADSVKGRFTISRDNAKNSLYLQMNSLRAEDTAVYYCARVSSGWYGGGAYYF | | (“HC”) amino acid sequence |
| | | DYWGQGTLVTVSS | | |
| Ab 448 | 896 | QSVVTQPPSVSGAPGQRVTISCTGSSSNIGAGYDVHWYQQLPGTAPKLLIYGNSNR | ADI-25549 | Light chain variable region |
| | | PSGVPDRFSGSKSGTSASLAITGLQAEDEADYYCQSYDSSLSALYVFGIGTKVTVL | | (“LC”) amino acid sequence |
| Ab 449 | 897 | QVQLVQSGGGLVKPGGSLRLSCAASGFTFSSYSMNWVRQAPGKGLEWVSSISSSS | ADI-25555 | Heavy chain variable region |
| | | SYIYYADSVKGRFTISRDNAKNSLYLQMNSLRAEDTAVYYCARQRGGIAVAGTYFDL | | (“HC”) amino acid sequence |
| | | WGRGTLVTVSS | | |
| Ab 449 | 898 | QPVLTQPPSVSGAPGQRVTISCTGSSSNIGAGYDVHWYQQLPGTAPKLLIYGNSNR | ADI-25555 | Light chain variable region |
| | | PSGVPDRFSGSKSGTSASLAITGLQAEDEADYYCQSYDSTVVFGGGTKLTVL | | (“LC”) amino acid sequence |
| Ab 450 | 899 | QVQLVQSGGGLVKPGGSLRLSCAASGFTFSSYSMNWVRQAPGKGLEWVSSISSSS | ADI-25556 | Heavy chain variable region |
| | | SYIYYADSVKGRFTISRDNAKNSLYLQMNSLRAEDTAVYYCARQRGGIAVAGTYFDL | | (“HC”) amino acid sequence |
| | | WGRGTLVTVSS | | |
| Ab 450 | 900 | QSVLTQPPSVSGAPGQRVTISCTGSSSNIGAGYDVHWYQQLPGTAPKLLIYGNSNR | ADI-25556 | Light chain variable region |
| | | PSGVPDRFSGSKSGTSASLAITGLQAEDEADYYCQSYDSTVVFGGGTKVTVL | | (“LC”) amino acid sequence |
| Ab 451 | 901 | EVQLLESGGGLVKPGGSLRLSCAASGFTFSSYSMNWVRQAPGKGLEWVSSISSSSS | ADI-25557 | Heavy chain variable region |
| | | YIYYADSVKGRFTISRDNAKNSLYLQMNSLRAEDTAVYYCARGYGSGSYLDYFDYW | | (“HC”) amino acid sequence |
| | | GQGTLVTVSS | | |
| Ab 451 | 902 | QPGLTQPPSVSGAPGQRVTISCTGSSSNIGAGYDVHWYQQLPGTAPKLLIYGNSNR | ADI-25557 | Light chain variable region |
| | | PSGVPDRFSGSKSGTSASLAITGLQAEDEADYYCQSYDSSLSGFYVFGTGTKLTVL | | (“LC”) amino acid sequence |
| Ab 452 | 903 | EVQLLESGGGLVKPGGSLRLSCAASGFTFSSYSMNWVRQAPGKGLEWVSSISSSSS | ADI-25559 | Heavy chain variable region |
| | | YIYYADSVKGRFTISRDNAKNSLYLQMNSLRAEDTAVYYCARDAAAKYYFDYWGQG | | (“HC”) amino acid sequence |
| | | TLVTVSS | | |
| Ab 452 | 904 | QPVLTQPPSVSGAPGQRVTISCTGSSSNIGAGYDVHWYQQLPGTAPKLLIYGNSNR | ADI-25559 | Light chain variable region |
| | | PSGVPDRFSGSKSGTSASLAITGLQAEDEADYYCQSYDSSLSGKVFGTGTKLTVL | | (“LC”) amino acid sequence |
| Ab 453 | 905 | QVQLVESGGGLVKPGGSLRLSCAASGFTFSDYYMSWIRQAPGKGLEWVSYISSSSS | ADI-25562 | Heavy chain variable region |
| | | YTNYADSVKGRFTISRDNAKNSLYLQMNSLRAEDTAVYYCARVGYSSSWYNYFDY | | (“HC”) amino acid sequence |
| | | WGQGTLVTVSS | | |
| Ab 453 | 906 | SYVLTQPPSVSGAPGQRVTISCTGSSSNIGAGYDVHWYQQLPGTAPKLLIYGNSNR | ADI-25562 | Light chain variable region |
| | | PSGVPDRFSGSKSGTSASLAITGLQAEDEADYYCQSYDSSLSGPVFGGGTKLTVL | | (“LC”) amino acid sequence |
| Ab 454 | 907 | EVQLVESGGGLVKPGGSLRLSCAASGFTFSSYSMNWVRQAPGKGLEWVSSISSSSS | ADI-25565 | Heavy chain variable region |
| | | YIYYADSVKGRFTISRDNAKNSLYLQMNSLRAEDTAVYYCARIRFDYGSGSYAFDIW | | (“HC”) amino acid sequence |
| | | GQGTMVTVSS | | |
| Ab 454 | 908 | QPVLTQPPSVSGAPGQRVTISCTGSSSNIGAGYDVHWYQQLPGTAPKLLIYGNSNR | ADI-25565 | Light chain variable region |
| | | PSGVPDRFSGSKSGTSASLAITGLQAEDEADYYCQSYDSSLSGSVFGGGTKLTVL | | (“LC”) amino acid sequence |
| Ab 455 | 909 | QVQLQQWGAGLLKPSETLSLTCAVYGGSFSGYYWSWIRQPPGKGLEWIGEINHSG | ADI-25567 | Heavy chain variable region |
| | | STNYNPSLKSRVTISVDTSKNQFSLKLSSVTAADTAVYYCARGLPRFGVVTPNWFDP | | (“HC”) amino acid sequence |
| | | WGQGTLVTVSS | | |
| Ab 455 | 910 | EIVLTQSPDSLAVSLGERATINCKSSQSVLYSSNNKNYLAWYQQKPGQPPKLLIYWA | ADI-25567 | Light chain variable region |
| | | STRESGVPDRFSGSGSGTDFTLTISSLQAEDVAVYYCQQYYSTPYTFGQGTKLEIK | | (“LC”) amino acid sequence |
| Ab 456 | 911 | EVQLLESGGGLVQPGGSLRLSCAASGFTFSSYWMHWVRQAPGKGLVWVSRINSD | ADI-25569 | Heavy chain variable region |
| | | GSSTSYADSVKGRFTISRDNAKNTLYLQMNSLRAEDTAVYYCAREGDSSGWPGGA | | (“HC”) amino acid sequence |
| | | FDIWGQGTMVTVSS | | |
| Ab 456 | 912 | SYVLTQPPSVSVSPGQAARITCSGDALPKQYAYWYQQKPGQAPVLVIYKDSERPSGI | ADI-25569 | Light chain variable region |
| | | PERFSGSSSGTTVTLTISGVQAEDEADYYCQSADSSGTFYVFGTGTKLTVL | | (“LC”) amino acid sequence |
| Ab 457 | 913 | QVQLVQSGAEVKKPGASVKVSCKASGYTFTGYYMHWVRQAPGQGLEWMGWIN | ADI-25572 | Heavy chain variable region |
| | | PNSGGTNYAQKFQGRVTMTRDTSISTAYMELSRLRSDDTAVYYCARDPYSSSSYYY | | (“HC”) amino acid sequence |
| | | YGMDVWGQGTTVTVSS | | |
| Ab 457 | 914 | DIVLTQSPLSLPVTPGEPASISCRSSQSLLHSNGYNYLDWYLQKPGQSPQLLIYLGSN | ADI-25572 | Light chain variable region |
| | | RASGVPDRFSGSGSGTDFTLKISRVEAEDVGVYYCMQALQTLYTFGQGTKVDIK | | (“LC”) amino acid sequence |
| Ab 458 | 915 | EVQLVESGAEVKKPGASVKVSCKASGYTFTSYYMHWVRQAPGQGLEWMGIINPS | ADI-25573 | Heavy chain variable region |
| | | GGSTSYAQKFQGRVTMTRDTSTSTVYMELSSLRSEDTAVYYCARGPYDSSGYCDY | | (“HC”) amino acid sequence |
| | | WGQGTLVTVSS | | |
| Ab 458 | 916 | SYELMQPPSVSVAPGKTARITCGGNNIGSKSVHWYQQKPGQAPVLVVYDDSDRPS | ADI-25573 | Light chain variable region |
| | | GTPERFSGSNSGNTATLTISRVEAGDEADYYCQVWDSSSDQVFGGGTKVTVL | | (“LC”) amino acid sequence |
| Ab 459 | 917 | EVQLVESGAEVKKPGASVKVSCKASGYTFTSYYMHWVRQAPGQGLEWMGIINPS | ADI-25575 | Heavy chain variable region |
| | | GGSTSYAQKFQGRVTMTRDTSTSTVYMELSSLRSEDTAVYYCARGPYDSSGYCDY | | (“HC”) amino acid sequence |
| | | WGQGTLVTVSS | | |
| Ab 459 | 918 | SYELTQPPSVSVAPGKTARITCGGNNIGSKSVHWYQQKPGQAPVLVVYDDSDRPS | ADI-25575 | Light chain variable region |
| | | GIPERFSGSNSGNTATLTISRVEAGDEADYYCQVWDSSSDQVFGGGTKLTVL | | (“LC”) amino acid sequence |
| Ab 460 | 919 | EVQLVESGGGLVQPGGSLRLSCAASGFTFSSYWMHWVRQAPGKGLVWVSRINSD | ADI-25576 | Heavy chain variable region |
| | | GSSTSYADSVKGRFTISRDNAKNTLYLQMNSLRAEDTAVYYCARGLYNWNHDYW | | (“HC”) amino acid sequence |
| | | GQGTLVTVSS | | |
| Ab 460 | 920 | NFMLTQPHSVSESPGKTVTISCTRSSGSIASNYVQWYQQRPGSSPTTVIYEDNQRPS | ADI-25576 | Light chain variable region |
| | | GVPDRFSGSIDSSSNSASLTISGLKTEDEADYYCQSYDSSNVVFGGGTKVTVL | | (“LC”) amino acid sequence |
| Ab 461 | 921 | QVTLKESGGGLVKPGGSLRLSCAASGFTFSSYSMNWVRQAPGKGLEWVSSISSSSS | ADI-25577 | Heavy chain variable region |
| | | YIYYADSVKGRFTISRDNAKNSLYLQMNSLRAEDTAVYYCARYSSSLGAFDIWGQGT | | (“HC”) amino acid sequence |
| | | MVTVSS | | |
| Ab 461 | 922 | QSALTQPPSVSGAPGQRVTISCTGSSSNIGAGYDVHWYQQLPGTAPKLLIYGNSNR | ADI-25577 | Light chain variable region |
| | | PSGVPDRFSGSKSGTSASLAITGLQAEDEADYYCQSYDSSLSDVFGTGTKLTVL | | (“LC”) amino acid sequence |
| Ab 462 | 923 | QVQLVESGGGVVQPGRSLRLSCAASGFTFSSYGMHWVRQAPGKGLEWVAVIWY | ADI-25587 | Heavy chain variable region |
| | | DGSNKYYADSVKGRFTISRDNSKNTLYLQMNSLRAEDTAVYYCARDSTYSEAFDIW | | (“HC”) amino acid sequence |
| | | GQGTMVTVSS | | |
| Ab 462 | 924 | QSVLIQPASVSGSPGQSITISCTGTSSDVGGYNYVSWYQQHPGKAPKLMIYDVSNR | ADI-25587 | Light chain variable region |
| | | PSGVSNRFSGSKSGNTASLTISGLQAEDEADYYCSSYTSSSTWVFGGGTKVTVL | | (“LC”) amino acid sequence |
| Ab 463 | 925 | EVQLVESGGGLVKPGGSLRLSCAASGFTFSSYSMNWVRQAPGKGLEWVSSISSSSS | ADI-25588 | Heavy chain variable region |
| | | YIYYADSVKGRFTISRDNAKNSLYLQMNSLRAEDTAVYYCARYSSSLGAFDIWGQGT | | (“HC”) amino acid sequence |
| | | TVTVSS | | |
| Ab 463 | 926 | QSVLTQPPSVSGAPGQRVTISCTGSSSNIGAGYDVHWYQQLPGTAPKLLIYGNSNR | ADI-25588 | Light chain variable region |
| | | PSGVPDRFSGSKSGTSASLAITGLQAEDEADYYCQSYDSSLSDVFGTGTKVTVL | | (“LC”) amino acid sequence |
| Ab 464 | 927 | EVQLVESGGGLVKPGGSLRLSCAASGFTFSSYSMNWVRQAPGKGLEWVSSISSSSS | ADI-25595 | Heavy chain variable region |
| | | YIYYADSVKGRFTISRDNAKNSLYLQMNSLRAEDTAVYYCARYQSSSWYYFDYWGQ | | (“HC”) amino acid sequence |
| | | GTLVTVSS | | |
| Ab 464 | 928 | SYVLTQPPSVSGAPGQRVTISCTGSSSNIGAGYDVHWYQQLPGTAPKLLIYGNSNR | ADI-25595 | Light chain variable region |
| | | PSGVPDRFSGSKSGTSASLAITGLQAEDEADYYCQSYDSSLSGVVFGGGTKLTVL | | (“LC”) amino acid sequence |
| Ab 465 | 929 | QVQLQESGPGLVKPSETLSLTCTVSPPSISSSSYYWGWIRQPPGKGLEWIGSIYYSGS | ADI-25598 | Heavy chain variable region |
| | | TYYNPSLKSRVTISVDTSKNQFSLKLSSVTAADTAVYYCARPDSSGAFDIWGQGTMV | | (“HC”) amino acid sequence |
| | | TVSS | | |
| Ab 465 | 930 | SYELTQPPSVSVSPGQTARITCSADALPKQYAYWYQQKPGQAPVLVIYKDSERPSGI | ADI-25598 | Light chain variable region |
| | | PERFSGSSSGTTVTLTISGVQAEDEADYYCQSADSSGTYVVFGGGTKLTVL | | (“LC”) amino acid sequence |
| Ab 466 | 931 | EVQLVQSGAEVKKPGASVRVYCKASGYTFTTYYIHWVRQAPGQGLEWMGMINPS | ADI-36669 | Heavy chain variable region |
| | | GGTTSYAQKFQGRLTMTGDTSTSTVYMELNYLRSEDTAVYYCTRDFIYFYGSGDGF | | (“HC”) amino acid sequence |
| | | DYWGQGTLVTVSS | | |
| Ab 466 | 932 | EIVMTQSPSAMSASVGDRVTITCRASQGISNYLAWFQQKPGKVPKRLIYAASSLQS | ADI-36669 | Light chain variable region |
| | | GVPSRFSGSGSGTEFTLTITSLQPEDFATYYCLQHNSYPFTFGPGTKVEIK | | (“LC”) amino acid sequence |
| Ab 467 | 933 | QVQLVQSGAEVKKPGSSVKVSCKASGGTFSTYTINWVRQAPGQGLEWMGRITPSL | ADI-36670 | Heavy chain variable region |
| | | GVPLSAQKFQGRITISADKSTTTAYMELSSLGSEDTAVYYCASLNYYDTTDYYLGYSD | | (“HC”) amino acid sequence |
| | | SWGQGTLVTVSS | | |
| Ab 467 | 934 | DIVLTQTPATLSVSPGERATLSCRASHSVSNNLAWYQQKPGQAPRLLIYSASTRATGI | ADI-36670 | Light chain variable region |
| | | PARFSGRGSGTEFTLTISSLQPEDFAVYYCQQYNNWPPEYTFGQGTKVDIK | | (“LC”) amino acid sequence |
| Ab 468 | 935 | EVQLLESGGGLVKPGGSLRLSCAASGFTFSGYYMTWIRQAPEKGLEWVSYISGGSTY | ADI-36671 | Heavy chain variable region |
| | | TNYADSVRGRFTISRDNARNSLYLQMNSLRAEDTAVYYCARDGGYGIGPLYWGQG | | (“HC”) amino acid sequence |
| | | SLVTVSS | | |
| Ab 468 | 936 | QPVLTQPPSVSGAPGQRVTISCTGSSSNIGAPFDVHWYQQLPGTAPKPLIYGNSNR | ADI-36671 | Light chain variable region |
| | | PSGVPDRFSGSKSGTSASLAITGLQAEDEADYYCQSYDSSLGGYVFGTGTKLTVL | | (“LC”) amino acid sequence |
| Ab 469 | 937 | EVQLVESGGGLVKPGGSLRLSCAASGFAFNNYYMNWVRQAPGKGLEWVSSISSAS | ADI-36672 | Heavy chain variable region |
| | | TYTDYADSVKGRFTISRDNAKNSLYLHLNSLRAEDTAVYYCARDYYGSGNYYNPKPL | | (“HC”) amino acid sequence |
| | | DVWGQGTTVTVSS | | |
| Ab 469 | 938 | QPVLTQPPSVSGAPGQRVTISCTGSSSNIGAGYDVHWYRQFPGTAPELLIYGNTNR | ADI-36672 | Light chain variable region |
| | | PSGVPDRFSGSKSGTSASLAITGLQAEDEADYYCQSYDSSLKGVFGGGTKLTVL | | (“LC”) amino acid sequence |
| Ab 470 | 939 | EVQLLESGGGLVKPGGSLRLSCAASGFKFRSYSMNWVRQAPGKGLEWVSSISSSSS | ADI-36674 | Heavy chain variable region |
| | | YVDYAGSLKGRFTISRDNAENSLYLQMNSLRAEDTAMYYCARAGSVPVAGTYNDY | | (“HC”) amino acid sequence |
| | | WGQGTLVTVSS | | |
| Ab 470 | 940 | QSVLTQPPSVSGAPGQRVTISCTGSSSNIGAGYDVHWYQHLPGTAPKLLIHGNNNR | ADI-36674 | Light chain variable region |
| | | PAGVPDRFSGSKSGTSASLVITGLQADDEADYYCQSYDRSLSVLFGGGTKVTVL | | (“LC”) amino acid sequence |
| Ab 471 | 941 | QVQLVQSGGGLVQPGGSLRLSCAASGFTFSSYEMNWVRQAPGKGLEWISYISSSG | ADI-36677 | Heavy chain variable region |
| | | DTKYYADSVKGRFTVSRDNAKYSLYLQMDSLRAEDTAVYYCASLYDSRGYYWVFDY | | (“HC”) amino acid sequence |
| | | WGQGTLVTVSS | | |
| Ab 471 | 942 | DIVMTQSPSSLSASVGDRVTITCQASQDISTYLNWYQHKPGKAPNLLIYDASNLEPG | ADI-36677 | Light chain variable region |
| | | VPSRFSGSGSGTDFTFTISSLQPEDIATYYCLQHDNLPPTFGQGTKVDIK | | (“LC”) amino acid sequence |
| Ab 472 | 943 | QVQLVQSGAEVKKPGESLKISCKGSGYSFRSYWIAWVRQMPGKGLEWMGTIFPG | ADI-36679 | Heavy chain variable region |
| | | DSDVTYSPSFQGQVTISVDKSTSTAYLQWGSLKASDTAIYYCARRYDYIDFWGQGTL | | (“HC”) amino acid sequence |
| | | VTVSS | | |
| Ab 472 | 944 | DIQMTQSPSSLSASVGDRVTITCQASQDIINHLNWYQQKPGKAPKLLIYDASNLHP | ADI-36679 | Light chain variable region |
| | | GVPSRFSGSGSGTYFTFTISSLQPDDFATYYCQQYDFLAHITFGPGTKVDIK | | (“LC”) amino acid sequence |
| Ab 473 | 945 | QVTLKESGAELRKPGESLKISCKASGYRFTNYWIGWVRQMPGKGLEWMGVIYPGD | ADI-36680 | Heavy chain variable region |
| | | SDTKYSPSFQGQVTMSADKSINTAYLQWSSLKASDTAIYYCVSLFGDYDYGALDYW | | (“HC”) amino acid sequence |
| | | GQGTLVTVSS | | |
| Ab 473 | 946 | ETTLIQSPATLSMSPGERATLSCRASQSVGRNLAWYQQKPGQAPRLLIYGASIRAT | ADI-36680 | Light chain variable region |
| | | GILARFSGSGSGTEYTLTISSLQPEDFAVYYCQQYHDWPSFTFGPGTKVDIK | | (“LC”) amino acid sequence |
| Ab 474 | 947 | EVQLVESGAEVKKPGESLKISCKASGYSFTRYWIGWVRQMPGKGLEWMGIIFPGD | ADI-36681 | Heavy chain variable region |
| | | SDTRYCPSFEGQVTISADRSINTAYLQWSSLKASDSAMYYCVTLYTDYDYGAPDHW | | (“HC”) amino acid sequence |
| | | GQGTLVTVSS | | |
| Ab 474 | 948 | DIVLTQSPATLSVSPGERATLSCRASQSLSGDLAWYQQKPGQAPRLLIYATSTRATGI | ADI-36681 | Light chain variable region |
| | | PARFSGSGSGAEFTLTISSLQSEDFAVYYCQQYYDWPLLTFGPGTKVEIK | | (“LC”) amino acid sequence |
| Ab 475 | 949 | EVQLVQSGAEVKKPGGSVKVSCKASGYTFSEYYMHWVRQAPGQGPEWVGRINPK | ADI-41144 | Heavy chain variable region |
| | | SGRTNYAQNFQGRVTMTRDRSISTVYMDLSRLRSDDTAVYYCARWEVMDYGSGI | | (“HC”) amino acid sequence |
| | | YYNQDHFDYWGQGTLVTVSS | | |
| Ab 475 | 950 | DIRVTQSPSSLSASVGDRVTITCRASQDITNYLAWFQQKPGKAPKSLMYAASTLQSG | ADI-41144 | Light chain variable region |
| | | VPSRFSGSGSGTDFTLTISSLQPEDFATYYCQQYKTYPITFGQGTRLEIK | | (“LC”) amino acid sequence |
| Ab 476 | 951 | QVQLVQSGPGLVKPSETLSLTCTVSAGSISNFYWSWIRQPPGKGLEWIGYIYYSGST | ADI-41145 | Heavy chain variable region |
| | | SYNPSLKSRVTISVDTSKNQFSLKLSSVTAADTAVYYCARSRSGWSLYDYWGQGTLV | | (“HC”) amino acid sequence |
| | | TVSS | | |
| Ab 476 | 952 | DIQVTQSPSSLSASVGDRVTITCRASQSISSFLNWYQQKPGKAPKLLIYVASSLQSGV | ADI-41145 | Light chain variable region |
| | | PSRFSGSGSGTDFTLTISSLQPEDFATYYCQQSYNTPLTFGGGTKVDIK | | (“LC”) amino acid sequence |
| Ab 477 | 953 | QVQLVQSGAEVKKPGESLKISCKGSGHSFATFWIGWVRQVPGNGLELMGIINLGD | ADI-41146 | Heavy chain variable region |
| | | SDTKYSPSFQGQVTISADESIGTAYLQWSSLKASDTAMYYCARVSLPHYYYYMDVW | | (“HC”) amino acid sequence |
| | | GKGTTVTVSS | | |
| Ab 477 | 954 | DIVMTQSPSSVSASVGDRVTITCRASQGISTWLAWYRQKPGKAPELLIYAASRLQSG | ADI-41146 | Light chain variable region |
| | | VPSRFSGSGSGTDFTLTISSLQPEDFATYYCQQANSFLGAFGPGTKLEIK | | (“LC”) amino acid sequence |
| Ab 478 | 955 | EVQLVESGGGLVKPGGSLRLSCAASGFTLSGYYMSWVRQAPGKGLEWISYISGGST | ADI-41147 | Heavy chain variable region |
| | | YTNYADSVNGRFTISRDNAKNSLYLQMDSLRAEDTAVYYCARLEYGDYGPYYLGLW | | (“HC”) amino acid sequence |
| | | GRGTLVTVSS | | |
| Ab 478 | 956 | QSVLTQPPSVSGAPGQRVTISCTGTSSNIGAGYDVHWYQKLPGTAPKLLIYANNNR | ADI-41147 | Light chain variable region |
| | | PSGVPDRFSGSKSGTSASLAITGLQAEDEADYYCQSYDTSLSAHYVFGTGTKLTVL | | (“LC”) amino acid sequence |
| Ab 479 | 957 | QVQLVQSGGGVVQPGRSLRLSCAASGFTFSDYGMHWVRQAPGKGLEWVAVIWF | ADI-41149 | Heavy chain variable region |
| | | DGSNKNYADSVKGRFTISRDNSMNTLYLQMNNLRAEDTAVYYCARAPYSFWSGYY | | (“HC”) amino acid sequence |
| | | LDYWGQGSLVTVSS | | |
| Ab 479 | 958 | DIVMTQSPATLSVSPGERATLSCRASQSISSNLAWYQQKSGQAPRLLIYGASTRATG | ADI-41149 | Light chain variable region |
| | | IPARFSGSGSGTEFTLTISSLQSEDFAVYSCQQYSKWPQTFGQGTKVEIK | | (“LC”) amino acid sequence |
| Ab 480 | 959 | EVQLVESGGGLVKPGGSLRLSCAASQFTFSTYDMSWVRQAPGKGLEWVASISSGS | ADI-41153 | Heavy chain variable region |
| | | TYIYYADSVKGRFTISRDNAKHSLFLQMKSLRAEDTALYYCARQVLYDRGGYYLYYFD | | (“HC”) amino acid sequence |
| | | HWGQGTLVTVSS | | |
| Ab 480 | 960 | DIQVTQSPSSLSASVGDRVTITCRASQTIASYLNWYQQKPGKAPNLLIYAASNLQSG | ADI-41153 | Light chain variable region |
| | | VPSRFSGSGSGTEFTLTINTLQPEDFATYYCQQSYNFPYTFGQGTKVEIK | | (“LC”) amino acid sequence |
| Ab 481 | 961 | QVQLQQWGAGLSKPSETLSVTCAVYGGSLSGHYWSWFRQPPGKGLEWIGEIDHS | ADI-41154 | Heavy chain variable region |
| | | GSTTYNPSLKSRVTISVDTSKNQFSLKLTSVTAADTAMYYCARATRYNYGYTFDYWG | | (“HC”) amino acid sequence |
| | | QGTLVTVSS | | |
| Ab 481 | 962 | DIPLTQSPSSLSASVGDRVTITCRASQIISSYLNWYQQKPGKAPKLLIYAASTLQSGVP | ADI-41154 | Light chain variable region |
| | | SRFSGSRSGTDFTLTISSLQPEDFASYYCQQSYIIPFTFGPGTKVEIK | | (“LC”) amino acid sequence |
| Ab 482 | 963 | QVQLQESGPGLVKPSETLSLTCTVSGGSIGNNFYYWGWIRQPPGKGLEWIGSIYYS | ADI-41155 | Heavy chain variable region |
| | | GTTYDNPSLKSRVTISVEPSKNQFSLKLSSVTAADTAVYHCARRYCDSTRCYEAFDIW | | (“HC”) amino acid sequence |
| | | GQGTTVTVSS | | |
| Ab 482 | 964 | SYELTQPPSASGTPGQRVTISCSGSSSNIGSNYVSWYQQLPGTAPKLLIYKNDQRPS | ADI-41155 | Light chain variable region |
| | | GVPDRFSGSKSGTSASLAISGLRSEDEAEYYCAAWDDSLSGFYVFGTGTKVTVL | | (“LC”) amino acid sequence |
| Ab 483 | 965 | QVQLVQSGGGLVQPGGSLRLSCVASGFIFSSYEMNWVRQAPGKGLEWVSYISSSG | ADI-41156 | Heavy chain variable region |
| | | STIYYADSVKGRFTISRDNAKNSLYLQMNSLGAEDTAVYYCARAILYFDYWGQGTLV | | (“HC”) amino acid sequence |
| | | TVSS | | |
| Ab 483 | 966 | GIRLTQSPSSLSASVGDRVTITCRASQSITNYINWYQQKPGKAPKLLIYAISRLQSGVP | ADI-41156 | Light chain variable region |
| | | SRFSGSGSGTDFTLTISSLQPEDFATYYCQQSYSTMYTFGQGTKVEIK | | (“LC”) amino acid sequence |
| Ab 484 | 967 | EVQLVESGPGLVKPSETLSLTCTVSGGSISTYYWSWIRQPPGKGLEWIGYIYYTGSTN | ADI-41157 | Heavy chain variable region |
| | | YNPSLKSRVTISLDTSKNQFSLKLSSVSAADTAFYYCARSPPVPGTRSWFDPWGQGT | | (“HC”) amino acid sequence |
| | | LVTVSS | | |
| Ab 484 | 968 | SPGLTQPQSAFGTPGQRVTISCFGSSSNIGRNHIYWYQQVPGTAPKLLIYRNNQRPS | ADI-41157 | Light chain variable region |
| | | GVPDRFFGSKFGTSASLAISGVRSEDEADYFCAAWDDSLSGPVFGGGTKLTVL | | (“LC”) amino acid sequence |
| Ab 485 | 969 | EVQLVESGGGLVQPGGSLRLSCAASGFTFSSYNIAWVRQAPGKGLEWISYISSSSSVI | ADI-41158 | Heavy chain variable region |
| | | YYADSVRGRFTISRDNAKNSLYLQMNSLRDEDTAMYYCARAGNDYNFWSGRSSEY | | (“HC”) amino acid sequence |
| | | FDYWGQGTLVTVSS | | |
| Ab 485 | 970 | DIVMTQSPATLSVSPGERATLSCRASQSVSSNLAWYQQKPGQAPRLLIYGASTRAT | ADI-41158 | Light chain variable region |
| | | GIPARFSGSGSGTEFTLTISSLQSEDFAVYYCQQYDNWPLYTFGQGTKLEIK | | (“LC”) amino acid sequence |
| Ab 486 | 971 | EVQLVESGAEVKKPGESLKISCKGSGYSFTTYWIGWVRQMPGKGLEWMGIMYPG | ADI-41159 | Heavy chain variable region |
| | | DSQTRYSPSFQGQVTISADKSISTAYLQWSSLKASDTAMYYCARGGYCSGGSCYRG | | (“HC”) amino acid sequence |
| | | LDYWGQGTLVTVSS | | |
| Ab 486 | 972 | EIVMTQSPSSLSASVGDRVTITCRASQSISSFLNWYQQKPGKAPNLLIYAASSLLSGV | ADI-41159 | Light chain variable region |
| | | PSRFSGSGSGTDFTLTISSLQPEDFATYYCQQSHSTPQTFGQGTKLEIK | | (“LC”) amino acid sequence |
| Ab 487 | 973 | QVQLVQSGAEVKKPGSSVKVSCKASGGTFSSYPIIWVRQAPGQGLEWMGRIIPILGI | ADI-41160 | Heavy chain variable region |
| | | ASYAQKFQGRVTITADKSTSTAYMELSSLRSEDTAVYYCARNSDFYYGMDVWGQG | | (“HC”) amino acid sequence |
| | | TTVTVSS | | |
| Ab 487 | 974 | QSALIQPASVSGSPGQSITISCTGTSSDVGGYNYVSWYQHHPGKAPKLMIYDVSNR | ADI-41160 | Light chain variable region |
| | | PSGISNRFSGSKSGNTASLTISGLQAEDEADYYCSSYTSSSLYVFGTGTKVTVL | | (“LC”) amino acid sequence |
| Ab 488 | 975 | EVQLVESGGGLVQPGGSLRLSCAASGFTFSTFEFNWVRQAPGKGLEWLSYISSDDT | ADI-41161 | Heavy chain variable region |
| | | TRYYADSVKGRFTISRDNAKNSLYLQMNSLRAEDTAYYYCVRGGPYDYVWGTYRYF | | (“HC”) amino acid sequence |
| | | DFWGQGTLVTVSS | | |
| Ab 488 | 976 | QSVLTQPASVSGSPGQSITISCTGTSSDIGGYNYVSWYQQHPGKAPKLMIYDVTNR | ADI-41161 | Light chain variable region |
| | | PLGVSNRFSGSKSGNTASLIISGLQAEDEAEYYCCSYTSSNSLVFGGGTKLTVL | | (“LC”) amino acid sequence |
| Ab 489 | 977 | EVQLVQSGAEVKKPGSSVKVSCKASGVTGGTFSSYAISWVRQAPGQGLEWMGGI | ADI-41162 | Heavy chain variable region |
| | | MPMFGTTNYAQKFQGRVTITADKSTSTAYMELSSLRSEDTAVYYCARDYRDFSPHL | | (“HC”) amino acid sequence |
| | | DYYYMDVWGKGTTVTVSS | | |
| Ab 489 | 978 | DIRLTQSPGTLSLSPGERATLSCRASQSVSTSYLAWYQQKPGQAPRLLIYGASNRAT | ADI-41162 | Light chain variable region |
| | | GIPDRFSGSGSGTDFTLTISRLEPEDFAVYYCQQYGRTSWTFGQGTKVDIK | | (“LC”) amino acid sequence |
| Ab 490 | 979 | QVQLVQSGGGVVQPGRSLRLSCAASGFPFHSYAMHWVRQAPGKGLEWVAVIWY | ADI-41163 | Heavy chain variable region |
| | | EGSEKHYADSVQGRFTISRDNSKNMLYLQMNNLRVADTAVYYCARRGAWGFDIW | | (“HC”) amino acid sequence |
| | | GQGTTVTVSS | | |
| Ab 490 | 980 | DIVMTQTPLSLPVTPGEPASISCRSSQSVLHSTGYNSLDWYLQKPGQSPQLLIFLGSN | ADI-41163 | Light chain variable region |
| | | RASGVPDRFSGSGSGTDFTLKISRVEAEDVGVYYCMQGLQTPYTFGQGTKVEIK | | (“LC”) amino acid sequence |
| Ab 491 | 981 | QVQLVQSGGDLVQPGGSLRLSCAASGFTFSDYEVNWVRQAPGKGLEWLSYISSSG | ADI-41164 | Heavy chain variable region |
| | | RIIHYADSVRGRFTISRDNAKNSLYLQMNSLRAEDTAVYYCARAAGQWLVTYYYYG | | (“HC”) amino acid sequence |
| | | MDVWGQGTTVTVSS | | |
| Ab 491 | 982 | QSVMTQSPSTLSASVGDTVTITCRASQSIINRLAWYQQKPGKPPKLLIYKSSSSESGV | ADI-41164 | Light chain variable region |
| | | PSKFSGSGSGTEFTLTINSLQPDDFATYYCQHYNSYLYTFGQGTKVEIK | | (“LC”) amino acid sequence |
| Ab 492 | 983 | EVQLVETGAEVKKPGESLKISCKGSGYSFTSYWIGWVRQMPGKGLEWMGIIYPGD | ADI-41165 | Heavy chain variable region |
| | | SDTRYSPSFQGQVTISADKSISTAYLQWSSLKASDTAMYYCARRYDYIDIWGQGTM | | (“HC”) amino acid sequence |
| | | VTVSS | | |
| Ab 492 | 984 | DIRVTQSPSSLSASVGDRVTITCQASQDISNYLNWYQQKPGKAPKLLIYDASNLETG | ADI-41165 | Light chain variable region |
| | | VPSRFSGSGSGTDFTFTISSLQPEDIATYYCQQYDNLAHITFGPGTKVEIK | | (“LC”) amino acid sequence |
| Ab 493 | 985 | EVQLVQSGAEVKKPGASVKVSCKTSGYTFTGDYLHWVRQAPGQGLEWMGRLNP | ADI-41166 | Heavy chain variable region |
| | | KSGGTVYAQRFQGRVTMTGDTSVTTAYMQLTRLRSDDTAIYYCARGIPVSGPVSID | | (“HC”) amino acid sequence |
| | | YWGQGTLVTVSS | | |
| Ab 493 | 986 | QSVLTQPASLSGSPGQSITISCTGTSSDVGGYGYVSWYQQHPGKAPKLMIYDVANR | ADI-41166 | Light chain variable region |
| | | PSGVSHRFSGSKSGNTASLTISGLQADDEADYYCSSYTRSNTVVFGGGTKLTVL | | (“LC”) amino acid sequence |
| Ab 494 | 987 | EVQLVETGGGVVQPGRSLRLSCAASGFTFSSYGMHWVRQAPGKGLEWVAVISYD | ADI-41168 | Heavy chain variable region |
| | | GSNKYYADSVKGRFTISRDNSKNTLYLQMNSLRTEDTAVYYCAKGGGYYYYYMDV | | (“HC”) amino acid sequence |
| | | WGKGTTVTVSS | | |
| Ab 494 | 988 | QPVLTQPASVSGSPGQSITISCTGTSSDVGGYNYVSWYQQHPGKAPKLMIYGVNN | ADI-41168 | Light chain variable region |
| | | RPSGVSNRFSGSKSGNTASLTISGLQGEDEADYYCNSYRSGITVVFGGGTKLTVL | | (“LC”) amino acid sequence |
| Ab 495 | 989 | EVQLVESGAEVKKPGESLKISCEAFGYSFTSYWIGWVRQVPGRGLEWIGVIYPGDSD | ADI-41169 | Heavy chain variable region |
| | | IRYTPSFRGQVTISADRSISTAYLQWNNLKASDTAMYYCARPGRDINYYHSRDYGAL | | (“HC”) amino acid sequence |
| | | DIWGQGTTVTVSS | | |
| Ab 495 | 990 | DIQLTQSPDSLAVSLGERVTINCKSSQSFLYSSNNKNYLAWYQQKPGQPPKLLIYWA | ADI-41169 | Light chain variable region |
| | | SVRESGVPDRFSGSGSGTDFTLTISSLQAEDVAVYYCQEYYSPPMFTFGQGTKVEIK | | (“LC”) amino acid sequence |
| Ab 496 | 991 | EVQLLESGGGLIQPGGSLRLSCAASGFTFNNYVMSWVRQAPGKGLEWVAAISSSG | ADI-41170 | Heavy chain variable region |
| | | VSTYYAASVKGRFTISRDNSKNMLYVQLNSLRAEDTAVYYCAKETGSYYYFDSWGQ | | (“HC”) amino acid sequence |
| | | GTLVTVSS | | |
| Ab 496 | 992 | ETTLTQSPSTLSGSVGDRVTITCRASESISSWLAWYQQKPGKAPKLLIYKASNLESGV | ADI-41170 | Light chain variable region |
| | | PSRFSGSGSGTEFTLTISSLQPDDFATYYCQQYNSYLITFGQGTRLEIK | | (“LC”) amino acid sequence |
| Ab 497 | 993 | EVQLVESGPGLVKPSQTLSLTCTVSGGSISSGGDYWSWVRQRPGKGLEWIGYIYNS | ADI-41171 | Heavy chain variable region |
| | | GSGYYNPSLKNRVSMSMHTSRNQFSLRLSSVTAADTAFYYCARDPFYRSGGIHYFD | | (“HC”) amino acid sequence |
| | | YWGQGALVTVSS | | |
| Ab 497 | 994 | DIVLTQTPGTLSLSPGEGATLSCRASPSVGSTSLAWYQQKPGQAPRLLIYGASSRAT | ADI-41171 | Light chain variable region |
| | | GIPDRFSGSGSGTDFTLTISRLEPEDFAVYYCQQDGGLPITFGLGTRLEIK | | (“LC”) amino acid sequence |
| Ab 498 | 995 | EVQLLESGGGLVQPGGSLRLSCSASGFTFSVYAMHWVRLAPGKGLEYVSTISGNGG | ADI-41172 | Heavy chain variable region |
| | | STYYGDSVKGRFTTSRDNSKNTVYLQMSSLRAEDTAVYYCVKAPARDHYEILTLLGY | | (“HC”) amino acid sequence |
| | | FDYWGQGTLVTVSS | | |
| Ab 498 | 996 | DIVMTQSPDSLAVSLGERATINCKSSQSVLYSSSNKNYLAWYQQKPGQPPKLLIYW | ADI-41172 | Light chain variable region |
| | | ASTRESGVPDRFSGSGSGTDFTLTISSLQAEDVAVYYCQQYYTIPPWTFGQGTKVEI | | (“LC”) amino acid sequence |
| | | K | | |
| Ab 499 | 997 | QVQLVQSGAEMKKPGSSAKVSCKASGGTLSSYAINWVRQAPGQGLEWMGGIIPIF | ADI-41173 | Heavy chain variable region |
| | | GTTKYAPKFQDRVTITVDESTSTAYMELSSLRSEDTAVYYCSRESSTWDVAHYFDYW | | (“HC”) amino acid sequence |
| | | GQGTLVTVSS | | |
| Ab 499 | 998 | DIVMTQTPSAISASVGDRVTITCRASQGISNYLAWVQQKPGKVPKRLIYGASSLQSG | ADI-41173 | Light chain variable region |
| | | VPSRFSGSGSGTEFTLTISSLQPEDFATYYCLQHNSYPYTFGQGTKVEIK | | (“LC”) amino acid sequence |
| Ab 500 | 999 | EVQLVESGAEVEKPGASVKVSCKASGYTFINYDIIWVRQAPGQGLEWMGWISGYK | ADI-41174 | Heavy chain variable region |
| | | GNTNYAQKLQGRITMSTDTSTRTAYMELRSLTSDDTAVYYCARVGGTARSTTPYYY | | (“HC”) amino acid sequence |
| | | GMDVWGQGTTVTVSS | | |
| Ab 500 | 1000 | SYVLTQPPSVSVSPGQTARITCSGDAVPKQFSYWYQQKPGQAPVLVIYKDIERPSGI | ADI-41174 | Light chain variable region |
| | | PERFSGSSSGTTVTLTISGVQAEDEADYYCQSAHTSGTYHVFGTGTKLTVL | | (“LC”) amino acid sequence |
| Ab 501 | 1001 | EVQLLESGGGVVQPGRSLRLSCATSGFTFSSYGMHWVRQAPGKGLEWVAVIYYEG | ADI-41175 | Heavy chain variable region |
| | | SNKYYGDSVKGRFTISRDNSKSTLYLQMNRLRAEDTAVYYCARRPAGGFDYWGPG | | (“HC”) amino acid sequence |
| | | TLVTVSS | | |
| Ab 501 | 1002 | EIVMTQSPLSLPVTPGEPASISCRSSQNLLNSNGYNYLDWYLQKPGQSPQLLIYLGS | ADI-41175 | Light chain variable region |
| | | NRASGVPDRFSGSGSGTDFTLKISRVEAEDVGVYYCMQALQTPYTFGQGTKLEIK | | (“LC”) amino acid sequence |
| Ab 502 | 1003 | EVQLVESGPGLVKPSETLSLTCTVSGGSIGNDYYYWGWIRQPPGKGLEWIGNISYSG | ADI-41176 | Heavy chain variable region |
| | | STYYNPSLKSRVTISVGTSKNQFSLKLTSVSAADTAVYHCVGRTFWRDCSSTSCYEYY | | (“HC”) amino acid sequence |
| | | FDYWGQGTLVTVSS | | |
| Ab 502 | 1004 | ETTLIQSPTSLSASVGDRVTITCRASQGISNYLAWYQQKPGKVPKVLIYAASTLQSGV | ADI-41176 | Light chain variable region |
| | | SSRFSGSGSGTGFTLTISNLQPEDVATYYCQNYNSAPWTFGQGTKVEIK | | (“LC”) amino acid sequence |
| Ab 503 | 1005 | QVQLVQSGAEVKKPGASVKVSCKASGYMFTGYYMHWVRQAPGQGLEWMGRIN | ADI-41177 | Heavy chain variable region |
| | | PNSGGTNYAQKFQGRVTMTRDTSISTGYMELSRLRSDDTAVYFCARDFFPLVIPTLI | | (“HC”) amino acid sequence |
| | | VGRGLYDMDVWGQGTMVTVSS | | |
| Ab 503 | 1006 | QPGLTQPPSASGTPGQRVTISCSGRSSNIGSNTVNWYQQLQGTAPKLLIYKNNQRP | ADI-41177 | Light chain variable region |
| | | SGVPDRFSGSKSGTSASLAISGLQSEDEADYYCAAWDDSLNGVVFGGGTKVTVL | | (“LC”) amino acid sequence |
| Ab 504 | 1007 | QVQLVESGAEVKKPGASVKVSCKASGYTFTDYYMHWVRQAPGQGLEWMGRINP | ADI-41178 | Heavy chain variable region |
| | | NSGGTNYAQKFQGRVTMTRDTSISTAYMELSSLRSDDTAVYYCARDLTAGGYGST | | (“HC”) amino acid sequence |
| | | WYSCGDYWGQGTLVTVSS | | |
| Ab 504 | 1008 | EIVLTQSPATLSVSPGERATLSCRASQSVSSNLAWYQQKPGQAPRLLIYGASTRATGI | ADI-41178 | Light chain variable region |
| | | PARFSGSGSGTEFTLTISSLQSEDFAVYYCQQYNNWPRWTFGQGTKVEIK | | (“LC”) amino acid sequence |
| Ab 505 | 1009 | QVQLVQSGAEVKKPGSSVKISCKASGGTFSSHPISWVRQAPGQGLEWMGRIVPIF | ADI-41179 | Heavy chain variable region |
| | | GIANYAQKFQGRVTMIADKSTNTAYMELSNLRSEDTAVYYCANPVYDSSGFQWG | | (“HC”) amino acid sequence |
| | | QGTLVTVSS | | |
| Ab 505 | 1010 | QPVLTQPRSVSGSPGQSVTISCTGTSGDGGFYNYVSWYQQHPGKTPKLMIYDVDQ | ADI-41179 | Light chain variable region |
| | | RPSGVPDRFSGSKSGNTASLTISGLQAEDEADYYCCSYPGNPLYVFGTGTKVTVL | | (“LC”) amino acid sequence |
| Ab 506 | 1011 | EVQLVQSGGGLVKPGGSLRLSCAASGFTFIDYYMSWIRQAPGKGLEWVSSISGGST | ADI-41180 | Heavy chain variable region |
| | | YTTYADSVKGRFTISRDNGKNSLYLQMDSLRAEDTAVYYCARLGGYSYYMDVWGK | | (“HC”) amino acid sequence |
| | | GTTVTVSS | | |
| Ab 506 | 1012 | QPVLTQPPSVSGAPGQRVTISCTGSSSNIGAGYDVHWYQHLPGAAPKLLIYDNTNR | ADI-41180 | Light chain variable region |
| | | PSGIPDRFSGSKSGTSASLAITGLQAEDEADYYCQSYDSSLDWVFGGGTKVTVL | | (“LC”) amino acid sequence |
| Ab 507 | 1013 | QVQLVQSGAEVKKPGSSVKVSCKASGGSFSSYTLNWVRQAPGQGLEWMGRFVPI | ADI-41181 | Heavy chain variable region |
| | | VGIANYAQKFQGRVTITADKSTSTVYMELSSLRSEDTAVYYCATAPTAYCSGDCYSLF | | (“HC”) amino acid sequence |
| | | DPWGQGTLVTVSS | | |
| Ab 507 | 1014 | QSVLIQPASVSGSPGQSITISCTGISSDVGSYNLVSWYQQHPGKAPKLIIYEVNKRPS | ADI-41181 | Light chain variable region |
| | | GVSNRFSGSKSGNTASLTISGLQAEDEADYYCCSYAVSRTSLYVFGTGTKVTVL | | (“LC”) amino acid sequence |
| Ab 508 | 1015 | QVQLVQSGAEVKKPGESLKISCQGSGYSFTSYWIGWVRQMPGKDLEWMGIIYPSD | ADI-41182 | Heavy chain variable region |
| | | SDTRYSPSFQGQVTISVDKSINTAYLQWTSLKASDTAMYYCARCDGAVYWYFDLW | | (“HC”) amino acid sequence |
| | | GRGTLVTVSS | | |
| Ab 508 | 1016 | EIVLTQSPATLSVSPGERVTLSCRASRSVSSHLAWYQQKPGQAPRLLMYGASTRAT | ADI-41182 | Light chain variable region |
| | | GIPARFSGSGSGTEFTLTISSLQSEDFGVYYCQQYNNWPPALTFGGGTKLEIK | | (“LC”) amino acid sequence |
| Ab 509 | 1017 | QVQLQESGAGLVKPSETLSLTCGVYGESFSGHSWSWIRQPPGRGLEWIGEINQSGT | ADI-41183 | Heavy chain variable region |
| | | TKYNPSLRSRVTISVDRSKNEFSLKVSSVTAADTAVYFCARYFRSFYTIGPDYYYMDV | | (“HC”) amino acid sequence |
| | | WGKGTTVTVSS | | |
| Ab 509 | 1018 | EIVLTQSPSSLSASVGDRVTITCRASQNINNYLNWYQQKPGKAPRLLIYAASSLQSGV | ADI-41183 | Light chain variable region |
| | | PSRFTGSGSGTDFTLTIRSLQSEDFATYYCQHSYSSSLLTFGGGTKVDIK | | (“LC”) amino acid sequence |
| Ab 510 | 1019 | EVQLLETGGGLVQPGGSLRLSCAASGFTFSSYDMNWVRQAPGKGLEWVSTISGSG | ADI-41184 | Heavy chain variable region |
| | | GPTYYAGSVKGRFTISRDNSKNTLYLQMNSLRADDTAVYYCAKAQLYDTSGYYLYYF | | (“HC”) amino acid sequence |
| | | DYWGQGTLVTVSS | | |
| Ab 510 | 1020 | DIRMTQSPSSLSASVGDRVTITCRASQRITSYLNWYQQKPGKAPKLLIYAASSLQSGV | ADI-41184 | Light chain variable region |
| | | PSRFSGSGSGTDFTLTISSLQPEDFATYFCQQSYSTSFTFGPGTKVDIK | | (“LC”) amino acid sequence |
| Ab 511 | 1021 | QVQLQQWGAGLLKPSETLSLTCAVYGGSFSSYYYSWIRQPPGKGLEWIGEINQSGS | ADI-41185 | Heavy chain variable region |
| | | TNYNPSLKSRVTISVDTSKNEFSLKLSSVTAADTAVYYCARIVREFNTRWYDYYYMD | | (“HC”) amino acid sequence |
| | | VWGKGTTVTVSS | | |
| Ab 511 | 1022 | DIRVTQSPATLSLSPGERATLSCRTSQSISSSYLAWYQQKFGQAPRLLIYGASSRATGI | ADI-41185 | Light chain variable region |
| | | PDRFSGSGSGTDFTLTISRLEPEDFAVYYCQQYGISPPMYTFGQGTKVEIK | | (“LC”) amino acid sequence |
| Ab 512 | 1023 | EVQLLESGAEVKKPGESLKISCKGSGYSFSSYWIAWVRQMPGKGLEWMGIIYPSDS | ADI-41186 | Heavy chain variable region |
| | | DTKYSPSFQGQVTISADKSISTAYLQWSSLKASDTAMYYCARQAGIQRPLDYWGQ | | (“HC”) amino acid sequence |
| | | GTLVTVSS | | |
| Ab 512 | 1024 | EIVMTQSPATLSVSPGERATLSCRASQSVRSNLAWYQQKPGQAPRLLIYDASTRAT | ADI-41186 | Light chain variable region |
| | | GISARFSGSGSGTEFTLTISSLQSEDFAVYYCQQFHNWPPYTFGQGTKVEIK | | (“LC”) amino acid sequence |
| Ab 513 | 1025 | QVQLQQWGAGLLKSSETLSLTCAVYGGSFSGYYWSWIRQSPGKGLEWIGEINHSG | ADI-41188 | Heavy chain variable region |
| | | SANYNPSLKNRVTISRDTSKNQFSLWLSSVTAADTAVYYCARTSRSPEPDNYYYYM | | (“HC”) amino acid sequence |
| | | DVWGRGTTVTVSS | | |
| Ab 513 | 1026 | QSVLTQPPSVSGAPGQRVSISCTGSSSDIGAGYDVHWYQQFPGTAPKLLMYANNN | ADI-41188 | Light chain variable region |
| | | RPSGVPDRFSGSRSGTSASLAITGLQAEDEADYYCQSYDSNLDVVVFGGGTKLTVL | | (“LC”) amino acid sequence |
| Ab 514 | 1027 | QVQLVESGGGLVKPGGSLRLSCAASGFTFSSYSMNWVRQAPGKGLEWVSSMSSS | ADI-41189 | Heavy chain variable region |
| | | SGYIDYADSVKGRFTISRDNAKNSLYLQMNSLRVEDTAVYYCARRNAVVVPSLMVV | | (“HC”) amino acid sequence |
| | | ADYYYGMDVWGQGTTVTVSS | | |
| Ab 514 | 1028 | QSVLTQPPSVSGAPGQRVTISCTGSSSNIGAGYDVHWYQQLPGTAPKLLIYGNSNR | ADI-41189 | Light chain variable region |
| | | PSGVPDRFSGSKSGTSASLAITGLQAEDEADYYCQSYDTSLSGPGYVFGTGTKLTVL | | (“LC”) amino acid sequence |
| Ab 515 | 1029 | QVQLVQSGAEVKKPGASVKVSCKAFGYTFRSYDMQWVRQAPGQRLEWMGWIN | ADI-41190 | Heavy chain variable region |
| | | AVNGDTKYSQKFQGRVTITRDTSATTVYMELSSLRSEDTAVYYCARWGRFWNSRS | | (“HC”) amino acid sequence |
| | | LDYYAMDVWGQGTTVTVSS | | |
| Ab 515 | 1030 | DIVMTQSPGTLSLSPGERATLSCRASQSISSSYLVWYQHKPGQAPRLLIYGASTRATD | ADI-41190 | Light chain variable region |
| | | IPDRFSGSGSGTDFTLTISRLEPEDFAVYYCQQYGSSPLTFGQGTRLEIK | | (“LC”) amino acid sequence |
| Ab 516 | 1031 | QVQLVQSGAEVKRPGASVKVSCKASGYIFSHYGISWVRQAPGQGLEWMAWISAY | ADI-41191 | Heavy chain variable region |
| | | NGNTNYAQKLQGRVIVTIDTSTSTAYMELRSLRSDDTAVYYCAREPPSLSAAATLD | | (“HC”) amino acid sequence |
| | | YWGQGTLVTVSS | | |
| Ab 516 | 1032 | EIVMTQSPLSLPVTLGQPASISCRSNQSLVYSDGNIYLSWFQQRPGQSPRRLIYKVSN | ADI-41191 | Light chain variable region |
| | | RDSGVPDRFSGSGSGTDFTLKISRVEAEDVAVYYCMQVTHWPHEFGQGTKLEIK | | (“LC”) amino acid sequence |
| Ab 517 | 1033 | QVQLVQSGAEVKKPGASVKVSCRTSGYTFTDYEINWVRQAPGQGLEWMGGISAY | ADI-41192 | Heavy chain variable region |
| | | NGKTDYAQNLQDRVTMTTDTSTSTAYMELRSLRSDDTAVYYCARIFYYDRSGYYLA | | (“HC”) amino acid sequence |
| | | LFDSWGHGTLVTVSS | | |
| Ab 517 | 1034 | DIQMTQSPSSLSASVGDRVTITCRASQRIASYLNWYQQKPGKAPKLLIYAASSLQSG | ADI-41192 | Light chain variable region |
| | | VPSRFSGSGSGTDFTLTISSLQPEDFATYYCQQSYSTPTLTFGGGTKMDIK | | (“LC”) amino acid sequence |
| Ab 518 | 1035 | EVQLVESGGGLVKPGMSLRLSCAASGFRFSDHYMNWIRQAPGKGLEWVSYISSSS | ADI-41193 | Heavy chain variable region |
| | | TYTDYTDSVKGRFTISRDNSKNSVYLQMNSLRAEDTAIYYCARVAPIRHNGDYIDYW | | (“HC”) amino acid sequence |
| | | GQGTTVTVSS | | |
| Ab 518 | 1036 | NFMLTQPPSASGTPGQRVTISCTGSSSNIGAGYDVHZYQQIPGTAPKWYGNNNRP | ADI-41193 | Light chain variable region |
| | | SGVPDRFSGSKSGTSASLAITGLQTEDEADYYCQSYDRGLSGRVFGTGTKVTVL | | (“LC”) amino acid sequence |
| Ab 519 | 1037 | QVQLQESGPGLVKPSQMLSLTCTVSGDSISSGDYYWSWIRHHPGKGLEWIGYISYS | ADI-41194 | Heavy chain variable region |
| | | GSTYNNPSLKSRVTVSVDTSKNQFFLKLTSVTAADTAVYYCARATKPYHSYFYMDV | | (“HC”) amino acid sequence |
| | | WGKGTTVTVSS | | |
| Ab 519 | 1038 | EIVLTQSPGTLSLSPGERATLSCRASQSGSRSYLAWYQQRPGQAPRLLIYGASNRAT | ADI-41194 | Light chain variable region |
| | | GIPDRFSGSGSGTDFTLTISRLEPEDFAVYYCQQYGNAPTFGGGTKVDIK | | (“LC”) amino acid sequence |
| Ab 520 | 1039 | EVQLVESGGGLVQPGGSLRLSCIVSGFPFNTYAMSWVRQAPGKGLEWVSVVSASG | ADI-41196 | Heavy chain variable region |
| | | GNTDYADSVKGRFTISRDNSKKTLYLQMNSLRAEDTAVYYCARTESNTLAPSWSGR | | (“HC”) amino acid sequence |
| | | YVTDWYFDLWGRGTLVTVSS | | |
| Ab 520 | 1040 | EIVMTQSPSSLSASVGDRVTITCRASQSISSFLNWYQQKPGKAPKLLISAASSLQSGV | ADI-41196 | Light chain variable region |
| | | PSRFSGSGSGTDFTLTISSLQPEDFATYYCQQSYSIPTFGQGTRLEIK | | (“LC”) amino acid sequence |
| Ab 521 | 1041 | QVQLVQSGAEVKKPGASVKVSCKASGYTFSGYYMHWVRQAPGQGLEWVGRINP | ADI-41197 | Heavy chain variable region |
| | | KSGDTVYAQKFQGRVTMTRDTSISTAYMELSRLISDDTAKYYCARQEDHYYGSGNF | | (“HC”) amino acid sequence |
| | | YNSFDFWGQGTLVTVSS | | |
| Ab 521 | 1042 | ETTLTQSPSSLSASVGDRVTITCRASQSISSNLNWYQQKPGKAPKLLIYGASTLQSGV | ADI-41197 | Light chain variable region |
| | | PSRFSGSGSGTDFTLTISSLQPEDLATYYCQQSYSNPGKTFGQGTKVDIK | | (“LC”) amino acid sequence |
| Ab 522 | 1043 | EVQLVQSGGVVIQPGGSLRLSCAASGFSFDEYLMHWVRQLPGKGLEWVALISWH | ADI-41198 | Heavy chain variable region |
| | | GDITYYADSVKGRFTISRDNSRYSLYLQMNSLRSDDTALYYCVKDGWIEGAFNHTFG | | (“HC”) amino acid sequence |
| | | IGYYFENWGQGTLVTVSS | | |
| Ab 522 | 1044 | DIVLTQTPSSLSASVGDRVTITCQASQDINNCLNWYQQKPGKAPEVLIFDASNLETG | ADI-41198 | Light chain variable region |
| | | VPLRFSGSGSGTHFTLTISSLQPEDIATYYCQQHENVPLTFGGGTKVEIK | | (“LC”) amino acid sequence |
| Ab 523 | 1045 | QVQLVESGGGLVKPGGSLRLSCGASGFTFPDYYMSWIRQAPGKGLEWLSYISSSSSF | ADI-41199 | Heavy chain variable region |
| | | TDYADSVKGRFTISRDNAKKSLYLQMNSLRAEDTAVYYCARVRADYVGNSRIHFDY | | (“HC”) amino acid sequence |
| | | WGQGTLVTVSS | | |
| Ab 523 | 1046 | DIVMTQSPVTLSVSPGERATLSCRASQSLNGYLAWYQQKPGQAPRLLIYGASTRAT | ADI-41199 | Light chain variable region |
| | | EPGWDTSGRGSGTEFTLTISSLQSEDFAVYYCQQYNDWPFTFGQGTRLEIK | | (“LC”) amino acid sequence |
| Ab 524 | 1047 | EVQLLESGGGLVKPGGSLRLSCAASGLTFSDHDMSWVRQAPGKGLEWVSGIGGSG | ADI-41200 | Heavy chain variable region |
| | | SNTYYAGSVKGRFTISRDNSKNTLYLQMDSLRVEDTAVYYCAKDPYGDYRDYYGM | | (“HC”) amino acid sequence |
| | | DVWGQGTTVTVSS | | |
| Ab 524 | 1048 | DIVLTQTPFSLPVTPGEPASISCRSSQSLLKSNGYNYLDWFLQKPGQSPQLLIYLGSN | ADI-41200 | Light chain variable region |
| | | RASGVPDRFSGSGSGTDFTLKISRVEAEDVGVYYCMQTLQALYTFGQGTKVEIK | | (“LC”) amino acid sequence |
| Ab 525 | 1049 | EVQLLESGGGLVQPGGSLRLSCAASGFAFDIYSMNWVRQAPGKGLEWLSYISSRGE | ADI-41201 | Heavy chain variable region |
| | | TIYYADSVKGRFTISRDNARNSLYLQMNGLRDEDTATYYCYYYGSGISSHGGAFDY | | (“HC”) amino acid sequence |
| | | WGQGTLVTVSS | | |
| Ab 525 | 1050 | DIVMTQTPATLSLSPGERATLTSRASQSVSSFLAWYQQKPGQAPRLLIYDVSNRATG | ADI-41201 | Light chain variable region |
| | | VPARFSGSGSGTDFTLTISSLEPEDIAVYYCQQRNTWPAITFGQGTKVEIK | | (“LC”) amino acid sequence |
| Ab 526 | 1051 | QVQLVESGAEVKKPGSSVKISCKASGGTFSSHPISWVRQAPGQGLEWMGRIVPIFG | ADI-41202 | Heavy chain variable region |
| | | IANYAQKFQGRVTMIADKSTNTAYMELSNLRSEDTAVYYCASPVYDSSGFQWGQG | | (“HC”) amino acid sequence |
| | | TLVTVSS | | |
| Ab 526 | 1052 | QSALIQPRSVSGSPGQSVTISCTGTSGDGGFYNYVSWYQQHPGKTPKLMIYDVDQ | ADI-41202 | Light chain variable region |
| | | RPSGVPDRFSGSKSGNTASLTISGLQAEDEADYYCCSYPGNPLYVFGTGTKLTVL | | (“LC”) amino acid sequence |
| Ab 527 | 1053 | QVQLVQSGAEVRKPGESLKISCKASGYRFTNYWIGWVRQMPGKGLEWMGVIYPG | ADI-41203 | Heavy chain variable region |
| | | DSDTRYSPSFQGQVTMSADKSTNTAYLQWSSLKASDTAIYYCVSLYSDYDYGALDY | | (“HC”) amino acid sequence |
| | | WGQGTLVTVSS | | |
| Ab 527 | 1054 | EIVMTQSPATLSVSPGERATLSCRASENVGRNLAWYQQKPGQAPRLLIYGASIRAT | ADI-41203 | Light chain variable region |
| | | GILARFSGSGSGTEYTLTISSLQSEDFAVYYCQQYHDWPSFTFGPGTKVDIK | | (“LC”) amino acid sequence |
| Ab 528 | 1055 | EVQLLESGGGLVKPGGSLRLSCAASGFTFSSYSMNWVRQAPGKGLEWVSSISAGSS | ADI-41204 | Heavy chain variable region |
| | | YIYYADSVKGRFTISRDNAKNSLYLQMNSLRAEDTAVYYCARVPSYETTPYFDYWG | | (“HC”) amino acid sequence |
| | | QGTLVTVSS | | |
| Ab 528 | 1056 | QSVLTQPPSVSGAPGQRVTISCTGSSSNIGSGYDLHWYQQLPGTAPKLLIYVNSNRP | ADI-41204 | Light chain variable region |
| | | SGVPDRFSGSKSGTSASLAITGLQAEDEADYYCQSYDSSLSGYVFGTGTKVTVL | | (“LC”) amino acid sequence |
| Ab 529 | 1057 | QVQLQESGPGLVKPSGTLSLTCAVSGGSISSTNWWSWVRQPPGKGLEWIGEIYHS | ADI-41205 | Heavy chain variable region |
| | | GSTNYNPSLKSRVTISVDKSNNQFSLNLSSVTAADTAVYYCARGVITYRGSWFLQYF | | (“HC”) amino acid sequence |
| | | DYWGQGTLVTVSS | | |
| Ab 529 | 1058 | DIRVTQSPDSLAVSLGERATINCKSSQSLFYSSNNQNYLAWYQQKPGQPPKLLIYW | ADI-41205 | Light chain variable region |
| | | ASTRQSGVPHRFSGSGSGTDFTLTISSLQAEDVAVYYCQQYYSSPLTFGGGTKVEIK | | (“LC”) amino acid sequence |
| Ab 530 | 1059 | EVQLLESGGGLVKPGGSLRLSCAGSGFSFSSYSMNWVRQAPEKGLEWVSSISASSSF | ADI-41206 | Heavy chain variable region |
| | | INYADSVKGRFIISRDNAKNSLFLQMDSLRAEDTAVYYCARDGVHPGGYIFGGYIDS | | (“HC”) amino acid sequence |
| | | WGQGTLVTVSS | | |
| Ab 530 | 1060 | QSVLTQPPSVSGAPGQRVTISCTGSSSNIGAGYDVHWFRQLPGTAPKLLIYGNNNR | ADI-41206 | Light chain variable region |
| | | PSGVPDRFSGSKSGSSASLIITGLQAQDEATYYCQSYDSSLSGYVFGTGTKLTVL | | (“LC”) amino acid sequence |
| Ab 531 | 1061 | QVQLVQSGPALVKPTQTLTLTCTFSGFSLSTKGMCVSWIRQPPGKALEWLALIDWD | ADI-41207 | Heavy chain variable region |
| | | DDKFYSTSLKTRLTISKDTSKNQVVLTMTNMDPVDTATYYCARTLYFYGSGSLSDYC | | (“HC”) amino acid sequence |
| | | FDYWGQGTPVTVSS | | |
| Ab 531 | 1062 | QPVLTQPRSVSGSPGQSVTISCTGTSRDVGNYNFVSWYQQHPGKAPKLIIYDVTKR | ADI-41207 | Light chain variable region |
| | | PSGVPDRFSGSKSGNTASLTISGLQAEDEADYYCCSYAGTYTWVFGGGTKVTVL | | (“LC”) amino acid sequence |
| Ab 532 | 1063 | QVQLVESGGDLVKPGGSLRLSCAASGFTLSGHYMSWIRQPPGKGLEWVSSISGGST | ADI-41208 | Heavy chain variable region |
| | | YTNYADSVKGRFTISRDNAENSLYLQMNSLRAEDTAVYYCARLAYSDYGPFYFDLW | | (“HC”) amino acid sequence |
| | | GRGTLVTVSS | | |
| Ab 532 | 1064 | QSVLTQPPSVSGAPGQRVTISCTGSSSNIGAGYDVHWYQQLTGTAPKLLIFDNNNR | ADI-41208 | Light chain variable region |
| | | PSGVPDRFSGSKSGTSASLAITGLQAEDEADYYCQSYDSRLSAPYVFGTGTKLTVL | | (“LC”) amino acid sequence |
| Ab 533 | 1065 | QVQLQESGAGLLKPSETLSLTCAVSGASFSGYSWSWIRQPPGKGLEWIGDIDHSGS | ADI-41209 | Heavy chain variable region |
| | | TNYNSSLNSRVTISVDTSKNQFSLNLTSVTAADTAIYYCARVGGRSAYWGQGTLVTV | | (“HC”) amino acid sequence |
| | | SS | | |
| Ab 533 | 1066 | DIVMTQSPLSLPVTPGEPASISCRSSQSLLHSNGFNYLDWYLQKPGQSPQLLIYLGSN | ADI-41209 | Light chain variable region |
| | | RASGVPDRFSGSGSGTDFTLKISRVEAEDVGVYYCMQALQTLTFGGGTKVEIK | | (“LC”) amino acid sequence |
| Ab 534 | 1067 | QVQLVQSGAEVKKPGASVKVSCKASGYTFNNYGISWVRQAPGQGLEWMGWISA | ADI-41210 | Heavy chain variable region |
| | | YNGDIKYAQKFQGRVTVTTDTSTSTAYMELRSLRSDDTAVYYCARDTPVGGGTQTF | | (“HC”) amino acid sequence |
| | | DYWGQGTLVTVSS | | |
| Ab 534 | 1068 | ETTLTQSPLSLPVTLGQPASISCRSSQSLVHSNGNTYLNWFQQRPGQSPRRLIYTVS | ADI-41210 | Light chain variable region |
| | | NRDSGVPDRFSGSGSGTDFTLKISRVEAEDVGVYYCMQATHRPGTFGQGTKVEIK | | (“LC”) amino acid sequence |
| Ab 535 | 1069 | EVQLLESGAEVKKPGASVKVSCKASGYTFTDYYIHWVRQAPGQGLEWMGRINPKN | ADI-41212 | Heavy chain variable region |
| | | GDAIYAQNFQGRVTMTRDTSISTAYMEVSRLTSDDTAVYYCARDQMWLVLDYWG | | (“HC”) amino acid sequence |
| | | QGTLVTVSS | | |
| Ab 535 | 1070 | QSALTQPASVSGSPGQSITISCTGTSSDVGGYDYVSWYQQHPGKAPKLMIHDVTN | ADI-41212 | Light chain variable region |
| | | RPSGISHRFSGSKSGNTASLTISGLQAGDEADYYCSSYTRSNTKVFGTGTKVTVL | | (“LC”) amino acid sequence |
| Ab 536 | 1071 | EVQLVESGGGLIQPGGSLRLSCAASGFTVSSNYMSWVRQAAGKGLEWVSLIYSGD | ADI-41213 | Heavy chain variable region |
| | | STYYADSVKGRFTISRDNSQNTLYLQMNSLRAEDTAVYYCARDASPNVGYYGMDV | | (“HC”) amino acid sequence |
| | | WGQGTTVTVSS | | |
| Ab 536 | 1072 | DIVLTQPPSVSVSPGQTASITCSGGKLGDTYACWYQQKPGQSPVLVIYQDSKRPSGI | ADI-41213 | Light chain variable region |
| | | PERFSGSNSGNTATLTISGTQAMDEADYYCQAWDSSTARYVFGTGTKVTVL | | (“LC”) amino acid sequence |
| Ab 537 | 1073 | EVQLVESGGGLVQPGGSLRLSCAASGFTFSSYWMSWVRQAPGKGLEWVATIKQD | ADI-41214 | Heavy chain variable region |
| | | GSEKYSVDSVKGRFTISRDNPKKSLYLQMNSLRAEDTAVYYCARDYRVEYYHSSDKL | | (“HC”) amino acid sequence |
| | | KRYYYYGMDVWGQGTTVTVSS | | |
| Ab 537 | 1074 | DIRVTQSPSSLSASVGDRVTITCRASQSISTYLNWYQQKPGKAPKFLIYAASSLESGVP | ADI-41214 | Light chain variable region |
| | | SRFSGSGSGTDFSLTISSLQPEDFATYYCQQSYSIPITFGQGTRLEIK | | (“LC”) amino acid sequence |
| Ab 538 | 1075 | QVQLVESGGGVVRPGGSLRLSCAASGFTFDDYGMSWVRQAPGKGLEWVSGINW | ADI-41215 | Heavy chain variable region |
| | | SGGSTDYADSVKGRFTISRDNAKNSLYLQMNSLRAEDTALYYCAKEGQEWELLPW | | (“HC”) amino acid sequence |
| | | YFDLWGRGTLVTVSS | | |
| Ab 538 | 1076 | QPVLTQPASVSGSPGQSITIPCTGTSSDVGIYNLVSWYQQHPGKAPKLMIYDVSKRP | ADI-41215 | Light chain variable region |
| | | SGVSNRFSGSKSGNTASLTISGLQAEDEADYYCCSYAGGSTYVFGTGTKLTVL | | (“LC”) amino acid sequence |
| Ab 539 | 1077 | EVQLVESGGGLVKPGESLRLSCAASGFRFSDHYMSWIRQAPGKGLEWISYISSSSSYI | ADI-41216 | Heavy chain variable region |
| | | HYADSVTGRFTISRDNAKNSMYLQMNSLRAEDTAVYYCAREIGRSYYMDVWGKG | | (“HC”) amino acid sequence |
| | | TTVTVSS | | |
| Ab 539 | 1078 | QSALIQPPSVSGAPGQRVTISCTGSSSNIGAGYDVHWYQQLPGTAPKLLIYGNNNR | ADI-41216 | Light chain variable region |
| | | PSGVPDRFSASKSGISASLAITGVQTEDEADYYCQSYDRSLSEFYVFGSGTKVTVL | | (“LC”) amino acid sequence |
| Ab 540 | 1079 | EVQLVQSGGGLVKPGGSLRLSCVASGFTFSSYSMNWVRQAPGKGLEWVSSISASSS | ADI-41217 | Heavy chain variable region |
| | | YIDYADSVKGRFTISRDNDKKSLYLQMSSLRAEDTAVYYCAREDYDSLTGYYSPKRFD | | (“HC”) amino acid sequence |
| | | PWGQGTLVTVSS | | |
| Ab 540 | 1080 | QSVLTQPPSLSGAPGQRVTISCTGSSSNIGAGYDVHWYQQLPGTAPKLLIYGNNNR | ADI-41217 | Light chain variable region |
| | | PSGVPDRFSGSKSGTSASLAITGLQAEDEADYYCQSYDRSLSVVFGGGTKVTVL | | (“LC”) amino acid sequence |
| Ab 541 | 1081 | QVQLVQSGAEVKKPGASVKVSCKASGYTFISDGISWVRQAPGQGLEWMGWINPH | ADI-41218 | Heavy chain variable region |
| | | NENTNYAQKFQGRVTMTTDTSTSTAYLELRGLRSDDTAVYYCARDPYHWSYLDYW | | (“HC”) amino acid sequence |
| | | GQGTLVTVSS | | |
| Ab 541 | 1082 | QSVVTQPPSVSGAPGQRVTITCTGSSSNIGANSDVHWYQQIPGTAPKLLIFGNSNR | ADI-41218 | Light chain variable region |
| | | PSGVPDRFSGSKSGTSASLAITGLQAEDEADYYCQSYDRSLSGSRVFGGGTRLTVL | | (“LC”) amino acid sequence |
| Ab 542 | 1083 | EVQLVESGGGLVQPAGSLRLSCAASGFTFSNYVMNWVRQAPGKGLEWVSYISSSG | ADI-41219 | Heavy chain variable region |
| | | RTIHYADSVKGRFTISRDNAKNSLYLEMNSLRAEDTAVYYCARDPNYGGNSNRFDS | | (“HC”) amino acid sequence |
| | | WGQGTLVTVSS | | |
| Ab 542 | 1084 | DIVMTQTPSSLSASVGDRVTITCRASQTISNYLNWYQQKPGKAPKLLIFAASSLQSG | ADI-41219 | Light chain variable region |
| | | VPSRFSGSGSGTDFTLTISSLQPEDFATYYCQQSYSAPRVTFGPGTKVDIK | | (“LC”) amino acid sequence |
| Ab 543 | 1085 | EVQLLESGGGLVKPGGSLRLSCAASGFTFSDYTMNWVRQAPGKGLEWVSSISITSS | ADI-41221 | Heavy chain variable region |
| | | HIYYADSVKGRFTISRDNAKNSLYLQINSLRAEDTAAYYCARELGFASSSYSYYYGMD | | (“HC”) amino acid sequence |
| | | VWGQGTTVTVSS | | |
| Ab 543 | 1086 | QSALTQPRSVSGSPGQSVTISCTGTSSDVGDYNSVSWYQQHPGTAPKLIIFDVTQR | ADI-41221 | Light chain variable region |
| | | PSGVPDRFSGSKSANTASLTISGLQPEDEADYYCCSFAGNYVFGTGTKVTVL | | (“LC”) amino acid sequence |
| Ab 544 | 1087 | QVTLKESGGGVVQPGRSQRLSCTASGFNFHNYAMHWVRQAPGKGLEWVAVISY | ADI-41222 | Heavy chain variable region |
| | | DGSNKNFADSVKGRFTISRDNSKNTLNLQMNNLRAEDTAVYYCVRDIVRGSPLFDY | | (“HC”) amino acid sequence |
| | | WGQGTLVTVSS | | |
| Ab 544 | 1088 | QPVLTQPPSLSVAPGQTAWITCGGNNIGSKIVHWYQQKPGQAPVVVVYDDDDRP | ADI-41222 | Light chain variable region |
| | | SGIPERFSGSNSGNTATLTIRRVEVGDEADYYCQVWDRSSDNYVFGTGTKVSVL | | (“LC”) amino acid sequence |
| Ab 545 | 1089 | QVQLVESGGGVVQPGRSLRISCAASGFTFSNYGMHWVRQAPGKGLEWVAVLSYD | ADI-41223 | Heavy chain variable region |
| | | GSNEYYADSVKGRFTISRDNSKNTLYLQMNSLRAEDTAVYYCAKNLNDYNISWYKC | | (“HC”) amino acid sequence |
| | | FDLWGRGTLVTVSS | | |
| Ab 545 | 1090 | QPVLTQPASVSGSPGQSITISCTGTSSDVGGYNYVSWYQHHPGKAPKLIIYDVNNR | ADI-41223 | Light chain variable region |
| | | PSGVSNRFSGSKSGNTASLTISGLQAEDEADYICSSYTTITTFVVFGGGTKLTVL | | (“LC”) amino acid sequence |
| Ab 546 | 1091 | EVQLVETGGGLVQPGRSLRLSCTASGFTFGDYAMNWVRQAPGKGLEWIGIIRTKT | ADI-41224 | Heavy chain variable region |
| | | YGGTTEYAASVKGRFTISRDDSKGIAYLQMNSLKTEDTGVYYCTMPVLNMDVWG | | (“HC”) amino acid sequence |
| | | QGTTVTVSS | | |
| Ab 546 | 1092 | QPVLTQPHSVSESPGKTVTISCTRNIGNIASNYVQWYQQRPGSSPTTVIYEDNQRPS | ADI-41224 | Light chain variable region |
| | | GVPDRFSGSIDISSNSASLTISGLKTEDEADYYCQSYDSNNPWVFGGGTQLTVL | | (“LC”) amino acid sequence |
| Ab 547 | 1093 | EVQLVESGGGLVKPGGSLRLSCAASGFSLSDYYMTWLRQAPGKGLEWVSSIGTTST | ADI-41225 | Heavy chain variable region |
| | | YTNYAESVKDRFTISRDNAKNSLYLQMNSLRAEDTAVYYCARDWGFGVERGYFDL | | (“HC”) amino acid sequence |
| | | WGRGTLVTVSS | | |
| Ab 547 | 1094 | DIVLTQTPSTLSASVGDRVTITCRASQSISFWLAWYQQKPGKAPKLLIYKASTLESGV | ADI-41225 | Light chain variable region |
| | | PSRFSGRGSGTDFTLTISSLQPDDFATYYCQQYNTYTWTFGQGTKVEIK | | (“LC”) amino acid sequence |
| Ab 548 | 1095 | EVQLVESGGGLVKPGGSLRLSCAASRFTFAGYYMSWIRQAPGKGLEWVSDISPSST | ADI-41226 | Heavy chain variable region |
| | | YTNYADSVKGRFTISRDNAGTSVSLQMDSLRADDTAVYYCARITPYGGSHYFDSWG | | (“HC”) amino acid sequence |
| | | QGTLVTVSS | | |
| Ab 548 | 1096 | QPVLTQPPSVSGAPGQRVTISCTGSSSNIGAGYDLHWYQQLPGTAPKLLIYGNSNR | ADI-41226 | Light chain variable region |
| | | PSGVPDRFSGSKSGTSASLAITGLQAEDEADYYCQSYDNSLSGFYVFGTGTKVTVL | | (“LC”) amino acid sequence |
| Ab 549 | 1097 | RSSWCSVGAEVKKRGSSVKVSCKASGGTFGGYAVSWVRQAPGQGLEWMGGIIP | ADI-41227 | Heavy chain variable region |
| | | MFYTTKYAQKLQGRVTITADESTNTAYMDLSSLTSDDTAIYFCAREWHLGRTAVTG | | (“HC”) amino acid sequence |
| | | TGAFLDAFDIWGQGTMVTVSS | | |
| Ab 549 | 1098 | SYELTQPPSVSEAPRQRVTISCSGSSSNIGNNAVNWYQQLPGKAPKLLIYYDDLLPS | ADI-41227 | Light chain variable region |
| | | GVSDRFSGSKSGTSASLAISGLQSEDEADYYCSAWDDSLNGWVFGGGTKLTVL | | (“LC”) amino acid sequence |
| Ab 550 | 1099 | EVQLLESGPGLVKPSETLSLTCTVSGGSISSYQWNWIRQPPGKGLEWLGYVYYSGST | ADI-41228 | Heavy chain variable region |
| | | NYNPSLKSRVILSVDTSKNQFSLKLSSVTAADTAVYYCARDRRDGSFVFDYWGQGT | | (“HC”) amino acid sequence |
| | | LVTVSS | | |
| Ab 550 | 1100 | QSVLIQPASVSGSPGQSITISCTGTSSDVGGYNYVSWYQQHPGKAPKLMIYDVSNR | ADI-41228 | Light chain variable region |
| | | PSGISNRFSGSKSGNTASLTISGLQAEDEADYYCSSYTSSTTLVFGTGTKVTVL | | (“LC”) amino acid sequence |
| Ab 551 | 1101 | QVQLVQSGGGVVQPGRSLKLSCAASGFTFKSYGMHWVRQAPGKGLEWVAVISYD | ADI-41229 | Heavy chain variable region |
| | | EINKYYADSVKGRFTISRDYSKNTLSLQMNSLTTEDTAMYYCAKPKTTGYYYLDAFD | | (“HC”) amino acid sequence |
| | | FWGQGTMVTVSS | | |
| Ab 551 | 1102 | ETTLTQSPSSLSASVGDRVTITCQASQDISNYLNWYQQKPGKAPKLLIYDASNLETG | ADI-41229 | Light chain variable region |
| | | VPSRFSGSGSGTDFTFTISSLQSEDIATYYCQQHDNVPPTFGQGTKVDIK | | (“LC”) amino acid sequence |
| Ab 552 | 1103 | QVQLVQSGAEVKKPGESLKISCKASGYSFTSHYWIGWVRQMPGKGLEWMGFIFP | ADI-41230 | Heavy chain variable region |
| | | GDSDTRYSPSLQGQVTISADKSTNTAYLQWNSLKASDTAMYYCARLEYLVSGFEYW | | (“HC”) amino acid sequence |
| | | GQGTLVTVSS | | |
| Ab 552 | 1104 | QPGLTQPHSVSESPGKTVTISCTRSSGSIASNYVHWYQQRPGSFPTTVIYEDNQRPS | ADI-41230 | Light chain variable region |
| | | GVPDRFSGSIDSSSNSASLTISGLRTEDEADYYCQSYDSSNPVVFGGGTKVTVL | | (“LC”) amino acid sequence |
| Ab 553 | 1105 | QVQLVQSGAEVKKPGESLKISCKGSGYSFTNNWVGWVRQMPGKGLEWMGIIFPG | ADI-41231 | Heavy chain variable region |
| | | DSDTRYSPSFRGQVTISVDTSINTAFLQWNSLGASDTAMYYCAMTDYNYSFKSWG | | (“HC”) amino acid sequence |
| | | QGTLVTVSS | | |
| Ab 553 | 1106 | NFMLTQPHSVSESPGKTITISCTRSSGNIGNNYVQWYQQRPGSSFTTVIYEDYQRPS | ADI-41231 | Light chain variable region |
| | | GVPDRFSGSIDSSSNSATLTISGLKTEDEADYYCQSYDSSNPYVFGTGTKVTVL | | (“LC”) amino acid sequence |
| Ab 554 | 1107 | QVQLVQSGAEVKKPGASVKVSCKASGYTFTHYGISWVRQAPGQGLEWMAWISAY | ADI-41232 | Heavy chain variable region |
| | | NGNTNYAQKLQDRVIVTIDTSTSTAYMELRSLRSDDTALYYCARDSMGGTTLFDY | | (“HC”) amino acid sequence |
| | | WGQGTLVTVSS | | |
| Ab 554 | 1108 | DIVLTQTPLSLPVTLGQPASISCRSSQSLVYSDGNTYLNWFQQRPGQSPRRLIYKVSN | ADI-41232 | Light chain variable region |
| | | RDSGVPDRFTGSGSGTDFTLKISRVEAEDVGVYYCMQGTHWPPMYTFGQGTKLEI | | (“LC”) amino acid sequence |
| | | K | | |
| Ab 555 | 1109 | EVQLLESGGGLVKPGGSLRLSCAASGFIFRDYYMIWIRQAPGKGLEWVSYISSSSTYT | ADI-41233 | Heavy chain variable region |
| | | NNADSVKGRFTISRDNAKNSLYLQMNSLRAEDTAVYYCARLFASRSDGAFDIWGQ | | (“HC”) amino acid sequence |
| | | GTTVTVSS | | |
| Ab 555 | 1110 | QSVLTQPPSVSGAPGQRVTISCTGSSSNIGAGYDVHWYQQLPETAPKLLIYDNNNR | ADI-41233 | Light chain variable region |
| | | PSGVPDRFSGSKSGTSASLAITGLQAEDEADYYCQSYDSSLSGYVFGTGTTVTVL | | (“LC”) amino acid sequence |
| Ab 556 | 1111 | QVQLVQSGGGVVQPGRSLRLSCAASGFTVSSYAIHWVRQSAGKGLEWVAVEGRF | ADI-41234 | Heavy chain variable region |
| | | TISRDNSKNTLYLQMNSLRAEDTAVYYCARLSEALVEPAAHTQYKYHYGLDVWGQ | | (“HC”) amino acid sequence |
| | | GTTVTVSS | | |
| Ab 556 | 1112 | EIVLTQSPLSLPVTPGEPASISCKSSQSLLDSNGYNYLDWYLQKPGQSPQLLIYLVSNR | ADI-41234 | Light chain variable region |
| | | ASGVPDRFSGSGSGTDFTLKISRVEAEDVGIYYCMQALQTPWTFGQGTKVEIK | | (“LC”) amino acid sequence |
| Ab 557 | 1113 | QVQLQQWGAGLLKPSETLSLTCGVYGESFSGHYWSWIRQPPGKGLEWMGEIHHS | ADI-41235 | Heavy chain variable region |
| | | GTTNYNPSLKSRVTISVDTSKNQFSLKLNSVTAADTAVYYCARNPAEDILTGYSPPFH | | (“HC”) amino acid sequence |
| | | YYYMDVWGKGTTVTVSS | | |
| Ab 557 | 1114 | QSVLIQPPSVSGAPGQRVTISCTGSSSNIGAGYDVHWYQQIPGTAPKLLIHSNNNR | ADI-41235 | Light chain variable region |
| | | PSGVPDRFSGSKSGTSASLAITGLQAEDEADYYCQSYDSSLSVVFGGGTKLTVL | | (“LC”) amino acid sequence |
| Ab 558 | 1115 | QVQLVQSGGGLVKPGGSLRLSCTASGFTFSDYYMDWIRQAPGKGLEWVSSISSSST | ADI-41236 | Heavy chain variable region |
| | | YTKYADSVKGRFTISRDNAKNSLFLQMNSLRAEDTAVYYCVRNLGPYCSSTSCFVFD | | (“HC”) amino acid sequence |
| | | YWGQGTLVTVSS | | |
| Ab 558 | 1116 | QSVLTQPPSVSGAPGQRVSISCTGSSSNIGAGYEVHWYKQVPGTAPRLLMYDNTN | ADI-41236 | Light chain variable region |
| | | RPSGVPDRVSGSKSGTSASLAITGLQAEDEADYYCQSYDNSLNKSVFGGGTKVTVL | | (“LC”) amino acid sequence |
| Ab 559 | 1117 | EVQLVESGGGLVKPGGSLRLSCAASGFTFSDYYMNWIRQAPGKGLEWVSDISPSSS | ADI-41237 | Heavy chain variable region |
| | | YTNYADSVKGRFTISRDNAKNSLYLQMNSLRAEDTAMYYCARRGSCTGGVCSFDY | | (“HC”) amino acid sequence |
| | | WGQGTLVTVSS | | |
| Ab 559 | 1118 | QPGLTQPPSVSGAPGQRVTISCTGSSSNIGAGYDVNWYQQLPGTAPKLLIYDNSNR | ADI-41237 | Light chain variable region |
| | | PSGVPDRFSGSKSGTSASLAITGLQAEDEADFYCQSYDSSLSGFVFGTGTKVTVL | | (“LC”) amino acid sequence |
| Ab 560 | 1119 | EVQLLESGGGLVKPGGSLRLSCAASGFTFRDYYMSWIRQAPGKGLEWVSYISSSSSY | ADI-41238 | Heavy chain variable region |
| | | TEYADSVKGRFTISRDNAKKSLYLQMNSLRTEDTAVYYCARVITQAGTGTTYYMDV | | (“HC”) amino acid sequence |
| | | WGKGTTVTVSS | | |
| Ab 560 | 1120 | QSVLTQPPSVSGAPGQRVTISCTGSSSNIGTGYDVHWYQQLPGTAPKLLIYANNNR | ADI-41238 | Light chain variable region |
| | | PSGVPDRFSGSKSGTSASLAITGLQAEDEADYYCQSYDSSLSLVFGGGTKLTVL | | (“LC”) amino acid sequence |
| Ab 561 | 1121 | QITLKESGPTLVKPTQTLTLTCTFSGFSLTTTGVGVGWIRQPPGKALEWLALIYWDD | ADI-41239 | Heavy chain variable region |
| | | DKRYSPSLKNRITITKDTSKKQVVLTMTNMDPADTATYYCAHISTVVTYDSSGSYYVL | | (“HC”) amino acid sequence |
| | | INWFDPWGQGTLVTVSS | | |
| Ab 561 | 1122 | EIVMTQSPLSLPVTPGEPASISCRSSHSLLHSNGYNYLDWYLQKPGQSPQLLIYLGSN | ADI-41239 | Light chain variable region |
| | | RASGVPDRFSGSGSGTDFTLKISRVEAEDVGVYYCMQALQTPLTFGQGTKVDIK | | (“LC”) amino acid sequence |
| Ab 562 | 1123 | QVQLQQWGAGLLKPSETLSLICDVYGGSFSDYYWSWIRQSPGKGLEWIGEINHSG | ADI-41240 | Heavy chain variable region |
| | | STSFHPSLKSRISISIDTSNNQFSLNLSSMTAADTAVYYCARGTLRGYFDYWGQGTLV | | (“HC”) amino acid sequence |
| | | TVSS | | |
| Ab 562 | 1124 | EIVLTQSPSTLSAFVGDRVTITCRASQSISRWLAWYQQKPGKAPNLLISEASSLESGV | ADI-41240 | Light chain variable region |
| | | PSRFSGSGSGTEFTLTISSLQPDDLGTYYCQQYNGYLWTFGQGTKVEIK | | (“LC”) amino acid sequence |
| Ab 563 | 1125 | QVQLVQSGAEVKKPGASVQVSCKASGYTFTGDYMHWVRQAPGQGLEWMGRIN | ADI-41241 | Heavy chain variable region |
| | | PNSGGTNYAQKFQGRVTMTRDTSISTAYMELSRLRSDDTAVYYCARAAAEYSSSSP | | (“HC”) amino acid sequence |
| | | TSYYYMDVWGKGTTVTVSS | | |
| Ab 563 | 1126 | EIQMTQSPSSLSASVGDRVTITCRASQNIYSFLNWYQQKPGKAPKLLIYAASSLQSG | ADI-41241 | Light chain variable region |
| | | VPSRFSGSGSATDFTLTISSLQPEDFATYYCQQSYSPPQITFGQGTKVDIK | | (“LC”) amino acid sequence |
| Ab 564 | 1127 | EVQLVESGGGVVQPGRSLRLSCAASGFPFSSYAMHWVRQAPGKGLEWVAVIWFE | ADI-41242 | Heavy chain variable region |
| | | GNEKYFADSVEGRFTISRDNSKNTLYLQMNSLRAEDTARYYCARFYFGAFDIWGQG | | (“HC”) amino acid sequence |
| | | TLVTVSS | | |
| Ab 564 | 1128 | DIVMTQSPLSLPVTPGEPASISCRSSQSLLHSNGYNSLDWYLQKPGQSPQLLIYLASN | ADI-41242 | Light chain variable region |
| | | RASGVPDRFSGSGSGTDFTLKISRVEAEDVGVYYCMQALQTPYTFGQGTKVEIK | | (“LC”) amino acid sequence |
| Ab 565 | 1129 | QVQLVQSRAEVKKPGESLKISCKGSLHSFSNNWIGWVRQMPGKGLEWMGIIFPD | ADI-41243 | Heavy chain variable region |
| | | DSDTRYSPSFQGQVTISADKSISTAYLQWSSLKASDTAIYYCGTVVTLIQGVADWGQ | | (“HC”) amino acid sequence |
| | | GTLVTVSS | | |
| Ab 565 | 1130 | QPVLTQPHSVSESPGKTVTISCTRSSGSIDSSYVQWYQQRPGSSPTTVIYEDNLRPSG | ADI-41243 | Light chain variable region |
| | | VPDRFSGSIDSSSNSASLTISGLKTEDEAEYYCQSYDSSNPVVFGGGTKLTVL | | (“LC”) amino acid sequence |
| Ab 566 | 1131 | QVTLKESGGGLIQPGGSLRLSCAVSGFTVSSKYMSWVRQAPGKGLEWVSVIYGGG | ADI-41244 | Heavy chain variable region |
| | | STYYTDSVKGRFTISRDNSNNTLYLQMNSLRAEDTAIYYCAREARSYNYDYVGNDAF | | (“HC”) amino acid sequence |
| | | DIWGQGTTVTVSS | | |
| Ab 566 | 1132 | DIVLTQTPDSLAVSLGERATINCKSSQSVLNNFNNKNYLAWYQQKPGQPPKLLIYW | ADI-41244 | Light chain variable region |
| | | ASTRESGVPDRFSGSGSGTDFTLTITSLQAEDVAIYYCQQYYRTPPYTFGQGTKVDIK | | (“LC”) amino acid sequence |
| Ab 567 | 1133 | QVQLVESGGGLVKPGGSLRLSCAASGFSFSAYYMSWIRQAPGKGLEWISNISGGSS | ADI-41245 | Heavy chain variable region |
| | | YANYADSVEGRFTISRDNAKNSLYLQMNSLRAEDTAVYYCAREFQTYYYMDVWGK | | (“HC”) amino acid sequence |
| | | GTTVTVSS | | |
| Ab 567 | 1134 | QPVLTQPPSVSGAPGQRVTISCTGSSSNIGAGYEVHWYQQLPGTAPKLLIYGNNNR | ADI-41245 | Light chain variable region |
| | | PSGVPDRFSGSKSGTSASLAITGLQAEDEADYYCQSYDSSLSGSVFGGGTKLTVL | | (“LC”) amino acid sequence |
| Ab 568 | 1135 | EVQLLESGPGLVKPSETLSLTCIVSGGSISSYNWNWIRQPPGKGLEWIGYIYNSGSTN | ADI-41246 | Heavy chain variable region |
| | | YNPSLKSRVTISVDTSKNQFSLKLSSVTAADTAVYYCARYFDYGSGGFDYWGQGTLV | | (“HC”) amino acid sequence |
| | | TVSS | | |
| Ab 568 | 1136 | ETTLIQSPGILSLSPGERATLSCRASQSVTSTYLAWYQQKPGQAPRLLIYGASSRAT | ADI-41246 | Light chain variable region |
| | | GIPDRFSGSGSGTDFTLTISRLEPEDFAVYYCQQFDSSLTFGGGTKVEIK | | (“LC”) amino acid sequence |
| Ab 569 | 1137 | QVQLVQSGAEVKKPGASLQVSCKASGYTFTDSYFHWVRQAPGQGLEWMGRISPH | ADI-41247 | Heavy chain variable region |
| | | SGGTNYAQKFQGRVTMTRDTSISTAYLELSRLRSDDTAVYYCATEGPRGPFRFDPW | | (“HC”) amino acid sequence |
| | | GQGTLVTVSS | | |
| Ab 569 | 1138 | NFMLTQPHSVSESPGKTVTISCTRSSGSIASNYVQWYQQRPGSSPTTVIYEDNQRPS | ADI-41247 | Light chain variable region |
| | | GVPDRFSGSIDSSSNSASLTISGLMTEDEADYYCQSYDSSNWVFGGGTKLTVL | | (“LC”) amino acid sequence |
| Ab 570 | 1139 | QVQLVQSGGGVVQPGRSLRLSCAASGFTFSSYSMHWVRQAPGKGLEWMAVCW | ADI-41248 | Heavy chain variable region |
| | | YDGSNIYYADSVKGRFTISRDNSKNTVYLQMNSLRAEDTAVYYCARDDRYCSGGTC | | (“HC”) amino acid sequence |
| | | LSAFDIWGQGTMVTVSS | | |
| Ab 570 | 1140 | ETTLIQSPSSLSASVGDRVTITCRASQSISSYLNWYQQKPGRAPKLLIYTTSSLQSGVS | ADI-41248 | Light chain variable region |
| | | SRFSGSGSGTDFTLTINSLQPEDFATYYCQQSYSTPNTFGQGTKVEIK | | (“LC”) amino acid sequence |
| Ab 571 | 1141 | QVQLVQSGAEVKKPGESLKISCQVSRDTSTTYWIGWVRQMPGKGLEWMGIIFPG | ADI-41249 | Heavy chain variable region |
| | | DSDTRYSPSFQGQVTISADKSIMTAYLQLTSLKASDTAMYYCATQALRGAFDIWGQ | | (“HC”) amino acid sequence |
| | | GTMVTVSS | | |
| Ab 571 | 1142 | DIRLTQSPSSLSASVGDRVTITCQASQDISNYLNWYQQKPGKAPKLLIYDASYLETGV | ADI-41249 | Light chain variable region |
| | | PSRFSGSGSGTDFTFTISSLQPEDFATYYCQQYDDLLFTFGPGTKLEIK | | (“LC”) amino acid sequence |
| Ab 572 | 1143 | QVQLQQWGAGLLKPSETLSLTCAVSGESLTGYFWSWIRQPPGKGLEWIGEVSHSG | ADI-41250 | Heavy chain variable region |
| | | STNYNPSLKSRVIMSVDTSKTQFSLKLNSVTAADTAVYYCARGYDYWSGTARYFDY | | (“HC”) amino acid sequence |
| | | WGQGILVTVSS | | |
| Ab 572 | 1144 | QPVLTQPASVSGSPGQSITISCTGTSSDVGGYNYVSWYQQHPGKAPKLMIYDVSNR | ADI-41250 | Light chain variable region |
| | | PSGVSSRFSGSKSGNTASLTISGLQAEDEGDYYCSSYRSSTTSRVFGGGTKVTVL | | (“LC”) amino acid sequence |
| Ab 573 | 1145 | EVQLVESGGGLVKPGGSLRLSCAASGFTFSDYYMTWIRQAPGKGLEWVSNISGGSS | ADI-41251 | Heavy chain variable region |
| | | YTNYADSVKGRFTISRDNAKNSVYLQMNSLRAEDTAVYYCARVGCSGGVCNFFLDY | | (“HC”) amino acid sequence |
| | | WGQGTLVTVSS | | |
| Ab 573 | 1146 | QSVLTQPPSVSGAPGQRVTISCTGSSSNIGAGYDVHWYQQLPGTAPKLLIYDNTNR | ADI-41251 | Light chain variable region |
| | | PSGVPDRFSGSKSGTSASLAITGLQAEDEADYYCQSYDSSLSGYVFGTGTKVTVL | | (“LC”) amino acid sequence |
| Ab 574 | 1147 | EVQLVQSGAEVKKPGESLKISCMGSGYNFPNYWIGWVRQMSGKGLEWMGIIYPD | ADI-41252 | Heavy chain variable region |
| | | DSDTTYSPSFQGQVIFSADKSISTAYLQWSSLKASDTAMYFCVRLDKTTQIDFWGQ | | (“HC”) amino acid sequence |
| | | GTLVTVSS | | |
| Ab 574 | 1148 | EIVLTQSPSSLSASVGDRVTITCQASQDISNYLNWYQQKPGKAPKLLIYDVSNLETGV | ADI-41252 | Light chain variable region |
| | | PSRFSGSGSGTDFTFTISSLQPEDIATYYCQQHDNLPLTFGQGTRLEIK | | (“LC”) amino acid sequence |
| Ab 575 | 1149 | EVQLVQSGPGLVKPSETLSLTCTVSGDSISSSDYSYYWGWIRQPPGKGLEWIASLSYS | ADI-41253 | Heavy chain variable region |
| | | GKTYSQSSLKSRVIISVDTSKKQFSLKLSSVTAADTAVYYCAVTRCYVCTSEGDSFDM | | (“HC”) amino acid sequence |
| | | WGQGTMVTVSS | | |
| Ab 575 | 1150 | DIVLTQTPGTLSLSPGERATLSCRASQSISGNYLAWYQHKPGQAPRLLIYGASTRATG | ADI-41253 | Light chain variable region |
| | | IPDRFSGSGSGTDFPLTISRLEPEDFAVYYCQQYATSPYTFGQGTKVDIK | | (“LC”) amino acid sequence |
| Ab 576 | 1151 | EVQLVESGGGLVQSGGSLRLSCAASGFTFSSYEMNWVRQAPGKGLEWVSYTTNN | ADI-41254 | Heavy chain variable region |
| | | GRTIYYADSVKGRFTISRDNAKNSLFLQMNGLRAEDTAVYYCARGIQFSRVDYAMD | | (“HC”) amino acid sequence |
| | | VWGQGTTVTVSS | | |
| Ab 576 | 1152 | SYELTQPPSVSGTPGQRITISCSGSSSNIASNTVNWYQHLPGTAPKLLIYSDNQRPSG | ADI-41254 | Light chain variable region |
| | | VPDRFSGSKSGTSASLAISGLQSEDEADYYCAIWDDSLNASYVFGTGTKLTVL | | (“LC”) amino acid sequence |
| Ab 577 | 1153 | EVQLVESGGGLVQPGGSLRISCAASGLTFSSYAMSWVRQAPGQGLEWVSSVSGSG | ADI-41255 | Heavy chain variable region |
| | | VSTYYADSVKGRFTISRDNSKNTLYLQMNSLRAEDTAVYYCAKEDYYHFYMDVWG | | (“HC”) amino acid sequence |
| | | NGTTVTVSS | | |
| Ab 577 | 1154 | ETTLTQSPATLSVSPGERATLSCRASQSVSSNLAWYQQKPGQAPRLLIYGASTRAAG | ADI-41255 | Light chain variable region |
| | | IPARFSGSGSGTEFTLTISSLQSEDFAVYYCQQHDNWPSYTFGQGTKVEIK | | (“LC”) amino acid sequence |
| Ab 578 | 1155 | QVQLVQSGAEVKSPGSSATVSCKASGGTFGSYGISWVRQAPGQGLEWIGAIMPM | ADI-41256 | Heavy chain variable region |
| | | FGTTNYAQKFQGRVTMTADESTSTVYMDVSSLRPDDTAVYYCVRDVFYDILTGYYD | | (“HC”) amino acid sequence |
| | | ADYYHHYMDVWGKGTTVTVSS | | |
| Ab 578 | 1156 | DIVMTQSPLSLPVTLGQPASISCRSGQSLVHSDGNTYLNWFQQRPGQSPRRLIYKV | ADI-41256 | Light chain variable region |
| | | SNRGSGVPDRFSGSGSGTDFTLKISRVEAEDVGVYFCMQGTHWPRTFGQGTKVDI | | (“LC”) amino acid sequence |
| | | K | | |
| Ab 579 | 1157 | QVQLVESGAEVKKPGSSVKVSCKASEGTFSSYGISWVRQAPGQGPEWMGEINPM | ADI-41257 | Heavy chain variable region |
| | | FGTAKYAQKFQGRVTITVDESTSTADMELSSLTSEDTAVYYCAREFLGQCSETNCPT | | (“HC”) amino acid sequence |
| | | PSRHLDYWGQGTLVTVSS | | |
| Ab 579 | 1158 | EIVMTQSPSSLSASVGDRVTITCRASRTISSYLNWYQQKPGKAPKLLIYATSNLQSGV | ADI-41257 | Light chain variable region |
| | | PSRFSGSGSGADFTLTISSLQPEDFATYYCQQTYSTPGFGPGTKVDIK | | (“LC”) amino acid sequence |
| Ab 580 | 1159 | QVQLVQSGGGLVQRGGSLRLSCAASGFSFRSYAMSWVRQAPGKGLEWVSSISDS | ADI-41258 | Heavy chain variable region |
| | | GDNTFYADSVKGRFSISRDNSRDTLYLQMNSLRAEDTAVYYCARGGYCSGGNCFPF | | (“HC”) amino acid sequence |
| | | DYWGQGTLVTVSS | | |
| Ab 580 | 1160 | SYELMQLPSVSVSPGQTARITCSGDALPKQYGYWYQQKPGQAPVLVIYKDSERPSG | ADI-41258 | Light chain variable region |
| | | IPERFSGSSSGTTVTLTISGVQAEDEADYYCQSADSGGTYVMFGGGTKLTVL | | (“LC”) amino acid sequence |
| Ab 581 | 1161 | QVQLVESGGRLVKPGGSLRLSCAASGFTFSDFYMSWIRQAPGKGLEWVSYISSSGD | ADI-41259 | Heavy chain variable region |
| | | DPNYADSVKGRFTISRDNSKNSLYLQMNSLRAEDTAVYYCARDEVGWNNLDYYFG | | (“HC”) amino acid sequence |
| | | MDVWGQGTTVTVSS | | |
| Ab 581 | 1162 | DIVMTQSPLSLPVTLGQPASISCRSSQSLVHSDGNTYLSWFHQRPGQSPRRLIYKVS | ADI-41259 | Light chain variable region |
| | | NRDSGVPNRFSGGGSGTDFTLKISRVEAEDVGFFYCMQGTHWQKTFGQGTKVEIK | | (“LC”) amino acid sequence |
| Ab 582 | 1163 | QVQLVQSGAEVKKPGSSVKVSCKASGGTFSSYGISWVRQAPGQGLEWMGGIIPM | ADI-41261 | Heavy chain variable region |
| | | FGAANYAQKFQGRVTITAETSTSTAFMELSSLRSDDTAVYYCARIRWVPNWGGTA | | (“HC”) amino acid sequence |
| | | TSFYNGMDVWGQGTTVTVSS | | |
| Ab 582 | 1164 | EIVMTQSPGTLSLSPGERATLSCRASQSVSSSYLAWYQQKPGQAPRLLIYGASSRAT | ADI-41261 | Light chain variable region |
| | | GIPDRFSGSGSGTDFTLTISRLEPEDFAVYYCQHYGSSLFTFGPGTKVDIK | | (“LC”) amino acid sequence |
| Ab 583 | 1165 | QVQLVQSGAEVKKPGASVKVYCKASGYTFTSHYIHWVRQAPGQGLEWMGRMNP | ADI-41263 | Heavy chain variable region |
| | | SGGSPMYAQKFQERVTMTRDTSTSTAYMELRSLRSEDTAVYYCAMAKFYSFDYW | | (“HC”) amino acid sequence |
| | | GQGTLVTVSS | | |
| Ab 583 | 1166 | QSVLTQPHSVSESPGKTVTISCTRSSGSIASYFVHWYQQRPGSAPTIVIYEDNQRPSG | ADI-41263 | Light chain variable region |
| | | VPDRFSGSIDSSSNSASLTISGLKTEDEADYYCQSYDSSNWVFGGGTKLTVL | | (“LC”) amino acid sequence |
| Ab 584 | 1167 | EVQLVESGGGLVKPGGSLRLSCAASGFTFSNTWMSWVRQAPGKGLEWVGHIKSK | ADI-41264 | Heavy chain variable region |
| | | TDGGTTDYAAPVKGRFTISRDDSKSILNLHLNSLKTEDSAVYYCAALPPISGWYYTPG | | (“HC”) amino acid sequence |
| | | FWGQGTLVTVSS | | |
| Ab 584 | 1168 | SYELTQPPSMSVSPGQTARITCFGDAVPKKYVYWYQQKSGQAPVMVIYDDRRRPS | ADI-41264 | Light chain variable region |
| | | GIPERFSGSSSGARATLTISGAQVEDEADYYCYSTDGSGNPSFGGGTKLTVL | | (“LC”) amino acid sequence |
| Ab 585 | 1169 | EVQLVQSGAEVKKPGESLTISCKDSGYSFTSYWIGWVRQVPGKGLEWMGIVYPGD | ADI-41265 | Heavy chain variable region |
| | | SRYSPSFQGHVTMSADKSINTAYLQWSTLKASDTAMYYCAKVVTYGSAIRWFESW | | (“HC”) amino acid sequence |
| | | GQGTLVTVSS | | |
| Ab 585 | 1170 | QSVLTQPPSVSAAPGQKVSISCSGSSSNIGNNFVSWYQQVPGTAPKLLIIDNNKRPS | ADI-41265 | Light chain variable region |
| | | GIPDRFSGSKSGTSATLGITGLQTGDEADYYCGTWDSRLSAEVFGGGTKLTVL | | (“LC”) amino acid sequence |
| Ab 586 | 1171 | QVQLQQSGPGLVKPSQTLSLTCAISGDSVSSNSAAWNWIRQSPSRGLEWLGRTYY | ADI-41266 | Heavy chain variable region |
| | | RSKWYNDYAVSVKSRITINPDTSKNQFSLQLNSVTPEDTAVYYCARDLPQVDYFDG | | (“HC”) amino acid sequence |
| | | ASFYFFDFWGQGTLVTVSS | | |
| Ab 586 | 1172 | QPVLTQPPSVSVAPGQTASITCGGNIIGNKGVHWYQQKPGRAPVLVVYDDSDRPS | ADI-41266 | Light chain variable region |
| | | GIPERFSGSNSGNTATLTISRVEAADEADYYCQVWDTGSHPVVFGGGTKVTVL | | (“LC”) amino acid sequence |
| Ab 587 | 1173 | QVQLVQSGPGLVKPSGTLSLTCAVSGGSISTTHWWSWVRQPPGKGLEWIGEIYHS | ADI-41267 | Heavy chain variable region |
| | | GSTNYNPSLKSRVTISVDKSRSQFSLKLTSVTAADTAVYYCARGDPLCSGGICYSGYF | | (“HC”) amino acid sequence |
| | | DYWGQGTLVTVSS | | |
| Ab 587 | 1174 | SYVLTQPPSVSVSPGQTATITCSGDKLGDQYACWYQQKSGQSPVLVIYRDNKRPSG | ADI-41267 | Light chain variable region |
| | | IPERFSGSNSGNTATLTISETQAMDEADYYCQAWGSSSVVFGGGTKVTVL | | (“LC”) amino acid sequence |
| Ab 588 | 1175 | EVQLVESGGGLVKPGGSLRLSCVASGFGFTSYSMNWVRQAPGKGLEWVSSISASST | ADI-41268 | Heavy chain variable region |
| | | YIHYADSVKGRFTISRDNARNSLYLQMISLRADDTAVYYCSRDGPTYGSGVHVWGQ | | (“HC”) amino acid sequence |
| | | GTMVTVSS | | |
| Ab 588 | 1176 | QSALIQPVSVSGSPGQSITISCTGTRSDVGGYNYVSWYQQHPGKAPKLMIYEVRNR | ADI-41268 | Light chain variable region |
| | | PSGVSDRFSGSKSGNTASLTISGLQAEDEGDYYCSSYTSSDTLFYVFGSGTKLTVL | | (“LC”) amino acid sequence |
| Ab 589 | 1177 | EVQLVESGGGVVQPGQSLRLSCAASGFTFSSFAMHWVRQAPGKGLEWVAVISYD | ADI-41270 | Heavy chain variable region |
| | | GSNKYYADSVKGRFTISRDNSKNTLSLQVNSLRAEDTAVYYCARVSAEGSMGRFSD | | (“HC”) amino acid sequence |
| | | FNYWGLGTLVTVSS | | |
| Ab 589 | 1178 | QSALTQPASVSGSPGQSITISCTGTSSDVGSYNLVSWYQQHPGKAPKLMIYEVRKR | ADI-41270 | Light chain variable region |
| | | PSGVSNRFSGSKSGNTASLTISGLQAEDEADYYCCSYAGSDTYVFGTGTKLTVL | | (“LC”) amino acid sequence |
| Ab 590 | 1179 | QVQLQESGPGLVKPSQTLSLTCAISGDSVSSNNAAWNWIRQSPSRGLEWLGRTYY | ADI-41271 | Heavy chain variable region |
| | | RSKWYNDYAVSVKSRITINPDTSKNQLSLQLNSVTPEDTAVYYCARAGVRQWLVRG | | (“HC”) amino acid sequence |
| | | MDAFDIWGQGTMVTVSS | | |
| Ab 590 | 1180 | DIRLTQSPDSLAVSLGERATVNCKSSQSVLYSSNNKNYLAWYQQKPGQPPKLLIYW | ADI-41271 | Light chain variable region |
| | | ASTRESGVPDRFSGSGSGTDFTLTISSLQAEDVAVYYCQQYYNTPHTFGQGTKVEIK | | (“LC”) amino acid sequence |
| Ab 591 | 1181 | EVQLLESGGDLVRPGGSLRLSCTASGFSFSSSEMNWVRQAPGKGLEWVASINSGG | ADI-41273 | Heavy chain variable region |
| | | DDIYYADSVKGRFTISRDNAKNSLSLQMDSLRAEDTALYYCARSRSGYSSGWSRFFG | | (“HC”) amino acid sequence |
| | | NWGQGTLVTVSS | | |
| Ab 591 | 1182 | QSALTQPRSVSGSPGQSVTISCTGTISDIGAYNYVSWYQQHPGKAPKVMIYDVSKR | ADI-41273 | Light chain variable region |
| | | PSGVPDRFSGSKSGFTASLTISGLQAEDEADYYCCSYAGRWVFGGGTKLTVL | | (“LC”) amino acid sequence |
| Ab 592 | 1183 | EVQLVESGGGLVKPGGSLRLSCAASGFSFSSYAMNWVRQAPGKGLQWVSSISAGS | ADI-41274 | Heavy chain variable region |
| | | SYIDYADSVKGRFTISRDNAENSLFLQMNSLRVEDTAVYYCARVGSYTHGYEFDYW | | (“HC”) amino acid sequence |
| | | GQGTLVTVSS | | |
| Ab 592 | 1184 | QPVLTQPPSVSGAPGQRVTISCTGSNSNIGAGYDVHWYQQLPGTAPKLLIYASTIRP | ADI-41274 | Light chain variable region |
| | | SGVPDRFSGSKSGTSASLAITGLQAEDEADYYCQSYDRNLSVVFGGGTKVTVL | | (“LC”) amino acid sequence |
| Ab 593 | 1185 | EVQLVESGGGLVKPGGSLRLSCAASGFMFSTYSMNWVRQAPGKGLEWVSFITGSS | ADI-41275 | Heavy chain variable region |
| | | SDKYYAHSVKGRFTISRDNAKRTLYLQLNSLRAEDTAVYYCARFRGLYCDGDCSSRG | | (“HC”) amino acid sequence |
| | | NTYYNYYGMDVWGQGTTVTVSS | | |
| Ab 593 | 1186 | EIVMTQSPLSLSVIPGEPASISCRSSKSLLHSNGYTYLDWYLQKPGQSPQLLIHLGSNR | ADI-41275 | Light chain variable region |
| | | ASGVPDRFSGSGSGTDFTLKISRVEAEDVGVFYCMQALQAPPTFGPGTKVEIK | | (“LC”) amino acid sequence |
| Ab 594 | 1187 | EVQLVESGGGLVQPGRSLRLSCRASGFTFRNYAMSWVRQAPGKGLEWVGFIRGK | ADI-41276 | Heavy chain variable region |
| | | GYGGTTEYAASVKGRFTISSDDSRSIAYLQMNSLKTEDTAVYYCTRVREDGVIAVAE | | (“HC”) amino acid sequence |
| | | YYFDYWGQGTLVTVSS | | |
| Ab 594 | 1188 | GIQMTQSPGTLSLSPGERATLSCRASQSVSSSYLAWYQQKPGQAPRLLIHGASSRAT | ADI-41276 | Light chain variable region |
| | | GIPDRFSGSGSGTDFTLTISRLEPEDFAVYHCQQYGSSPWTFGQGTKVEIK | | (“LC”) amino acid sequence |
| Ab 595 | 1189 | QVQLQESGPGLVKPSGTLSLTCAVSGGSITGRNWWSWVRQPPGKELERIGEIYHG | ADI-41277 | Heavy chain variable region |
| | | GSTEYNPSLKGRVTISVDKSKNQFSLRLNSVTAADTAVYYCARVAHYDSNGYYIGYF | | (“HC”) amino acid sequence |
| | | DLWGRGTLVTVSS | | |
| Ab 595 | 1190 | EIVLTQSPPSLSASVGDRVTITCRASQSISIYLNWYQQKPGKAPKLLIFAASSLQSGVP | ADI-41277 | Light chain variable region |
| | | LRFSGSGSGTDFTLTISSLQPEDFATYYCHQSYSAPWTFGQGTKVDIK | | (“LC”) amino acid sequence |
| Ab 596 | 1191 | EVQLVESGPALVKPTQTLTLTCTFSGFSLSTKRMGVSWIRQPPGKALEWLARIDWD | ADI-41278 | Heavy chain variable region |
| | | DDKFYSTSLKTRLTISKDTSKNQVVLTLANMDPVDTATYFCARTTVYASGGYYLYYLD | | (“HC”) amino acid sequence |
| | | YWGQGTLVTVSS | | |
| Ab 596 | 1192 | DIVMTQTPSSLSASVGDRVTLTCRASQRIASYVNWYHQKPGKAPNLLIYAASNLQS | ADI-41278 | Light chain variable region |
| | | GVPSRFSGSGSGTDFTLTISSLQPEDFATYYCQQSYSTPLTFGQGTKLEIK | | (“LC”) amino acid sequence |
| Ab 597 | 1193 | QVQLVQSGAEVKKAGETLKISCRGPAHTFTSFWIGWVRQTPGKGLEWMGNIYPG | ADI-41279 | Heavy chain variable region |
| | | DTDTTYSPSFRGQVTISADKSISTAYLQWNSLKASDTAIYYCATRVRHGYSSSGSFES | | (“HC”) amino acid sequence |
| | | WGQGTMVTVSS | | |
| Ab 597 | 1194 | QSVVTQPPSVSGAPGQRITISCTGSNSNTGAGYDVHWYQQLPGAAPKLLIFANNN | ADI-41279 | Light chain variable region |
| | | RPSGVPDRFSGSKSGTSASLAITGLQAEDEADYYCQSYDNSLSAYVFGTGTKLTVL | | (“LC”) amino acid sequence |
| Ab 598 | 1195 | QVQLVESGPGLVKPSETLALTCTVSGGSLSTYYWSWIRQPPGKGLEWIGYIYYSGTT | ADI-41280 | Heavy chain variable region |
| | | YYNPSLKSRVTISEDRSKNQFSLKLTSVTAADTAVYYCARHGPKTEFWSAQYYLELW | | (“HC”) amino acid sequence |
| | | GRGTLVTVSS | | |
| Ab 598 | 1196 | EIVLTQSPGTLSLSPGERATLSCRASQSVSSDYLAWYQQKPGQAPSLLIYGVSTRATG | ADI-41280 | Light chain variable region |
| | | IPDRISGSGSGTDFTLTISRLEPEDFAVYYCHQYGTSPWTFGQGTKVEIK | | (“LC”) amino acid sequence |
| Ab 599 | 1197 | QVQLVQSGAEVKKPGASVKVSCKASGYSFTNHGIHWVRQAPGQRLEWMGWINV | ADI-41281 | Heavy chain variable region |
| | | ANGFTAYSQNLQGRVTFTRDTSASTAYLELTSLRSEDTAVYHCARDESYCSAGYCYL | | (“HC”) amino acid sequence |
| | | YFDYWGQGTTVTVSS | | |
| Ab 599 | 1198 | DIQVTQSPSSLSASVGDRVTITCRASQNIITYVNWYQQKPGKAPELLIFGASSVQSG | ADI-41281 | Light chain variable region |
| | | VPSRFSGSGSGTDFTLTISSLRPDDFATYYCQQSYSNPRTFGGGTKVEIK | | (“LC”) amino acid sequence |
| Ab 600 | 1199 | QVQLVQSGGGVVQPGRSLRLSCAASGFMFTIYSMHWVRQAPGKGLEWVAVISN | ADI-41282 | Heavy chain variable region |
| | | DGVNKYYSDSVKGRFTISRDNSKNTLYLQMNNLRAEDTAVYYCASDIVVLVTATDY | | (“HC”) amino acid sequence |
| | | WGQGTLVTVSS | | |
| Ab 600 | 1200 | ETTLTQSPVTLSLSPGERATLSCRTSQSFSSPLLAWYQQKPGQAPRLLIYGASNRATG | ADI-41282 | Light chain variable region |
| | | IPDRFSGSGSGTDFTLTISRLEPVDFAVYYCQQYGSSPYTFGQGTKLEIK | | (“LC”) amino acid sequence |
| Ab 601 | 1201 | QVTLKESGPTLVKPTQTLTLTCTFSGFSLSTFGVAVGWIRQPPGKALEWLALIYWDD | ADI-41283 | Heavy chain variable region |
| | | DKRYSPSLKSRLTITKDISKNQVVLTMTNMDPVDTATYYCAHRLRSLTARGVFDIWG | | (“HC”) amino acid sequence |
| | | QGTTVTVSS | | |
| Ab 601 | 1202 | DIRLTQSPSSLSASVGDRVTITCRASQSINNFLNWYQQRPGKAPTLLIYSASSLQSGV | ADI-41283 | Light chain variable region |
| | | PSRFSGSGSGTDFTLTISSLQPEDFATYFCQQTDSFPWTFGQGTKVEIK | | (“LC”) amino acid sequence |
| Ab 602 | 1203 | QVQLVQSGGGLVKPGGSLRLSCAASGFTFSNAWMSWVRQAPGKGLEWVGRIKSE | ADI-41284 | Heavy chain variable region |
| | | VDGGTADYAANVKGRLTISRDDSKNMMYLQMNSLKTEDTAVYYCTTDPGVGWIF | | (“HC”) amino acid sequence |
| | | GEVKLFRTDPEYWGQGTLVTVSS | | |
| Ab 602 | 1204 | QSVLTQPPSVSAAPGQKVTISCSGSSSNIGNHYVSWYQQLPGTSPKLLIYDNNKRPS | ADI-41284 | Light chain variable region |
| | | GIPDRFSGSKSGTSATLGITGLQPGDEADYYCGTWDSSLSAVRVFGGGTKVTVL | | (“LC”) amino acid sequence |
| Ab 603 | 1205 | QVQLVQSGAEVKKPGSSVKVSCKASGGTFSYYAISWVRQAPGQGLEWMGGIIPIL | ADI-41285 | Heavy chain variable region |
| | | GTVKNAQKFQGRVTITADKITSIAYMELSSLRHEDTAVYYCARDYYDSSGYYYNGYG | | (“HC”) amino acid sequence |
| | | MDVWGQGTTVTVSS | | |
| Ab 603 | 1206 | QSVLIQPPSASGTPGQRVTISCSGSSSNIGSNYVYWYQQLPGTAPKLLIYRNDQRPS | ADI-41285 | Light chain variable region |
| | | GVPDRFSGSKSGTSASLAISGLRSGDEADYYCAAWDDSLGGPIWVFGGGTKLTVL | | (“LC”) amino acid sequence |
| Ab 604 | 1207 | QVQLVQSGAEVKKPGASVKVSCKASGYTFISYGISWVRQAPGQGPEWMGWISTH | ADI-41286 | Heavy chain variable region |
| | | NGNTNYAQKLQGRVTMTTDTSTSTAYMELRSLRSDDTAVYYCARDERSIAVEVYLG | | (“HC”) amino acid sequence |
| | | STFDIWGQGTMVTVSS | | |
| Ab 604 | 1208 | DIQVTQSPSSVSASVGDRVTITCRASQGISSWLAWYQQKPGKAPKLLIYAASTLQSG | ADI-41286 | Light chain variable region |
| | | VPSRFSGSGSGTDFTLTISRLQPEDFATYYCQQANIFGVTFGPGTKVDIK | | (“LC”) amino acid sequence |
| Ab 605 | 1209 | EVQLVESGGGLVQPGRSLRLSCAASGFTFDDYAMHWVRQAPGKGLEWVSSISWH | ADI-41287 | Heavy chain variable region |
| | | SADIGYAASVEGRFTISRDNAKNSLFLQMNSLRPEDTALYYCAKEIVSTSWYSGYFQ | | (“HC”) amino acid sequence |
| | | DWGQGTLVTVSS | | |
| Ab 605 | 1210 | QPVLTQPRSVSGSPGQSVTISCTGTSSDVGDYNYVSWYQQHPGKAPKLMIYDVSK | ADI-41287 | Light chain variable region |
| | | RPSGVPDRFSGSKSGNTASLTISGLQGEDEADYYCCSYAGRHTFVFGTATKVTVL | | (“LC”) amino acid sequence |
| Ab 606 | 1211 | EVQLVESGGGLVQPGGSLRLSCAASGFTFSSYAMSWVRQAAGKGLEWVSAISGSG | ADI-41288 | Heavy chain variable region |
| | | DDTFYADSVKDRFIISRDSSKRKVYLQMNSLRVEDTAVYYCAKTDIMVTFGGVVVD | | (“HC”) amino acid sequence |
| | | AYYFDHWGQGTLVTVSS | | |
| Ab 606 | 1212 | ETTLIQSPGILSLSPGERATLSCRASQFVFRSYLAWYQQRPGQPPRLLIYGASSRATG | ADI-41288 | Light chain variable region |
| | | IPDRFSGRGSGTEFTLTISRLEPEDFAMYYCQHYDSSPPGTFGGGTKVEIK | | (“LC”) amino acid sequence |
| Ab 607 | 1213 | EVQLVQSGAEVKKPGESLKISCKGSGYSFSSFWIGWVRQMPGKGLEWMGIIYPGD | ADI-41289 | Heavy chain variable region |
| | | SDTRYSPSFQGQVTISADQSIRTAYLQWNSLKASDTGLYYCAKGGLGDVEMATIAV | | (“HC”) amino acid sequence |
| | | WGQGTLVTVSS | | |
| Ab 607 | 1214 | QSVLIQPASVSGSPGQSITIPCTGTSSDVGSYNLVSWYQHHPGKAPKLIISEGSKRPL | ADI-41289 | Light chain variable region |
| | | GVSNRFSGSKSGNTASLTISGLQAEDEADYYCSSYVRSRTFNYVFGTGTKLTVL | | (“LC”) amino acid sequence |
| Ab 608 | 1215 | QVQLQQWGAGLLKPSETLSLTCVVYGESFSDSGYYWTWIRQPPEKGLEWIGEINH | ADI-41291 | Heavy chain variable region |
| | | GGSTSYNPSLKSRVTISVDTSENQFSLKVTSVTGADTAVYYCARLRLGCSGGSCYSRF | | (“HC”) amino acid sequence |
| | | DYWGQGTLVTVSS | | |
| Ab 608 | 1216 | DIQLTQSPSSLSASVGDRVTITCRASQSINSYLNWYQQKPGKAPVLLIHAASSLQGG | ADI-41291 | Light chain variable region |
| | | VPSRFSGSGSGTDFTLTISSLQPEDFATYYCQQSYNTRWTFGHGTKVDIK | | (“LC”) amino acid sequence |
| Ab 609 | 1217 | EVQLLESGGGVVQPGRSLRLSCAASGFSFSSYGIHWVRQAPGKGLECVALMSYDGS | ADI-41292 | Heavy chain variable region |
| | | EKYYADSVKGRFTISRDNSKNTLYLHMNSLRREDTAVYYCAKGSHLRWSHLDYYFHL | | (“HC”) amino acid sequence |
| | | WGRGTLVTVSS | | |
| Ab 609 | 1218 | DIVMTQSPSTLSASVGDRVTITCRASQSLSTWLAWYQQKPGKAPKLLISDASNLESG | ADI-41292 | Light chain variable region |
| | | VPSRFSGRGSGTEFTLTISGLQPDDFATYYCQQERTFGQGTKVDIK | | (“LC”) amino acid sequence |
| Ab 610 | 1219 | QVQLQQSGPGLAKPSQTLSLTCTVSGGPISGVDYYWSWIRQPPGKGLEWIGYIYYS | ADI-41293 | Heavy chain variable region |
| | | GSTYYNPSLKSRVTISVDTSKKQFSLKMSSVTAADTAVYYCARDVGATPYYYYGMD | | (“HC”) amino acid sequence |
| | | VWGQGTTVTVSS | | |
| Ab 610 | 1220 | DIVLTQSPDTLSLSPGERATLSCRASQSVRSNYLAWYQHKPGQAPRLLIYGASSRVA | ADI-41293 | Light chain variable region |
| | | GIPDRFSGSGSGTDFTLTISRLEPEDFAVYYCQQYGSSPPSVTFGGGTKVEIK | | (“LC”) amino acid sequence |
| Ab 611 | 1221 | EVQLLESGGGLVQPGGSLRLSCAASGFTFSAYEMNWVRQAPGKGLEWVSYISSSG | ADI-41294 | Heavy chain variable region |
| | | SNKHYADSVKGRFTISRDNAKNSLHLHMNSLRAEDTALYYCTRPHQEEWELLPNDA | | (“HC”) amino acid sequence |
| | | FDLWGQGTMVTVSS | | |
| Ab 611 | 1222 | QSALTQPPSASGSPGQSVTISCTGTSTDVGAYTYVSWYQQHPGKAPKLIIYEVYKRP | ADI-41294 | Light chain variable region |
| | | SGVPNRFFGSKSGNTASLTVSGLQAEDEADYYCSSYGGSNNFGLFGGGTKLIVL | | (“LC”) amino acid sequence |
| Ab 612 | 1223 | EVQLVESGVEVKKPGESLKISCRGSGYTFYNYWIAWVRQKPGKGLEYMGTIYLDDS | ADI-41296 | Heavy chain variable region |
| | | ETIYSPSFQGEVTISADKSINTAYLQWNSLKASDTANYYCARQMDFYFDVWGRGTL | | (“HC”) amino acid sequence |
| | | VTVSS | | |
| Ab 612 | 1224 | SYELMQPPSVSVSPGQTARITCSGDPLPRESAYWYQQKPGQAPVVIIFNDIERPLGI | ADI-41296 | Light chain variable region |
| | | PERFSGSRSGTTVTLTISGAQAEDEADYYCQSADSRKTFVFGTGTKLTVL | | (“LC”) amino acid sequence |
| Ab 613 | 1225 | QVQLVQSGAEVKKPGSSVKVSCKASGGTFSTDAISWVRQAPGQGLEWMGGIIPLF | ADI-41297 | Heavy chain variable region |
| | | GTANYAQKFQGRVTITADESTSTAYMELNSLRSVDTAVYYCGRTGAFDGEVVVRP | | (“HC”) amino acid sequence |
| | | HLDLWGQGTLVTVSS | | |
| Ab 613 | 1226 | QPVLTQPASVSGSPGQSITISCTGTSSDVGGYDYVSWYQHHPGKAPKLMIYEVSNR | ADI-41297 | Light chain variable region |
| | | PSGVSNRFSGSKSGNTASLTISGLQADDEAAYYCSSYTRSNTLLFGGGTKLTVL | | (“LC”) amino acid sequence |
| Ab 614 | 1227 | EVQLVESGGGLVHPGRSLRLSCGASGFTFRSFAMHWVRQAPGKGLEWVAVISYD | ADI-41299 | Heavy chain variable region |
| | | GSDEYYADSVKGRFTISRDNSRNTLFLQMNRLRPEDTAIYYCARAYCSTSNCPVLDY | | (“HC”) amino acid sequence |
| | | WGQGTLVTVSS | | |
| Ab 614 | 1228 | QSVLIQPASVSGSPGQSITISCTGTSSDVGGYSLVSWYQQHPGKAPKLIIFEGNKRPA | ADI-41299 | Light chain variable region |
| | | GVSDRFSGSKYGDTASLTISGLQAEDEADYYCCSYAGGHSVFGGGTKVTVL | | (“LC”) amino acid sequence |
| Ab 615 | 1229 | QVQLVESGGGVVQPGRSLRLSCAASGFTFSSYAMQWVRQAPGKGLEWVAVMTN | ADI-41302 | Heavy chain variable region |
| | | DGDDKYYADSVRGRFTISRDNSKNTLYLQMNNLRPEDTAVYYCARDLFEWWELLG | | (“HC”) amino acid sequence |
| | | YCYAMDVWGQGTTVTVSS | | |
| Ab 615 | 1230 | QSVLTQPPSASGSPGQSVTISCTGTSSDVGAYNYVSWYQQHPGKAPKLIIYEVYKRP | ADI-41302 | Light chain variable region |
| | | SGVPDRFFGSKSGNTASLTVSGLQAEDEADYYCSSYAGSNTLGVFGGGTKVTVL | | (“LC”) amino acid sequence |
| Ab 616 | 1231 | QVQLVQSGGGLVRPGGSLRVSCAASGFIFNNYALTWVRQAPGKGLEWVSAISGSG | ADI-41303 | Heavy chain variable region |
| | | SSTYYADSVKGRFTISRENSNNRLYLQLSGLRAEDTAVYFCARVRGLVWFEGRIDPY | | (“HC”) amino acid sequence |
| | | PNVFDYWGQGTLVTVSS | | |
| Ab 616 | 1232 | DIVLTQSPGTLSLSPGERATLSCRASQSVSNDYLAWYQQKPGQAPRLLIYDASSRAI | ADI-41303 | Light chain variable region |
| | | GIPDRFSGSGSGTDFTLIISRLEPEDFAVYYCHHPGKFGQGTKVEIK | | (“LC”) amino acid sequence |
| Ab 617 | 1233 | EVQLVESGPGLVKPSQTLSLTCTVSGGSIRSHDYYWSWIRQPPGKGLEWIGYSYYSG | ADI-41304 | Heavy chain variable region |
| | | STYYNPSLKSRVIISLDTSKNQFSLNLTSVTAADTAMYYCARDRPHTSSWIPGWFDP | | (“HC”) amino acid sequence |
| | | WGQGTLVTVSS | | |
| Ab 617 | 1234 | SYELTQPPSASGTPGQRVTISCSGSSSNIGSNTVSWYQQFPGKAPKLLIYSNNERPSG | ADI-41304 | Light chain variable region |
| | | GPDRFSGSKSGTSASLAIGGLQSEDEANYYCAAWDDSLYAVVFGGGTKLTVL | | (“LC”) amino acid sequence |
| Ab 618 | 1235 | QVTLKESGPGLVKPSQTLSLICTVSGGSISGGGYYWSWIRQLPGKGLQWIGCIYDS | ADI-41305 | Heavy chain variable region |
| | | GTTYYNPSLKSLVTISIDTSKNQFSLKLSSVTAADTAVYYCARGGSLDDFWSATWYFA | | (“HC”) amino acid sequence |
| | | LWGRGTLVTVSS | | |
| Ab 618 | 1236 | EIVLTQSPGTLSLSPGERATLSCRASQSVSSNYLAWYQQKPGQAPRLLIYGASSRATG | ADI-41305 | Light chain variable region |
| | | IPDRFSGSGSGTDFTLTISRLEPEDFAFYYCQQYGRSPYTFGPGTKLEIK | | (“LC”) amino acid sequence |
| Ab 619 | 1237 | QVQLVESGPRLVKPSQTLSLICTVSGGSIYRGDYDWNWIRQPPGKGLEWIGYISYT | ADI-41306 | Heavy chain variable region |
| | | GNTHYNSSLKSRLSISADTSGTHFSLKLSSVTAADTAIYYCARDVGYGGNAAHYYYYA | | (“HC”) amino acid sequence |
| | | MDVWGQGTTVTVSS | | |
| Ab 619 | 1238 | ETTLTQSPATLSLSPGERATLSCRASQSVGSSLAWYQQKVGQAPRLLIYDASSRVTGI | ADI-41306 | Light chain variable region |
| | | PARFSGSGSGTDFTLTISSLEPGDFAVYYCQQRSNSLTFGGGTKVEIK | | (“LC”) amino acid sequence |
| Ab 620 | 1239 | QVQLVESGGGLVKPGGSLRLSCAASGFPLSPYALNWVRQAPGKGLEWVSSITSSSA | ADI-41307 | Heavy chain variable region |
| | | YIYYADSVKGRFTVSRDNPTNSLYLQMNSLRAEDTAVYYCARTIPQHYYDNNGDYY | | (“HC”) amino acid sequence |
| | | NYGMDVWGQGTTVTVSS | | |
| Ab 620 | 1240 | DIVLTQSPATLSVSPGQRITLSCRASQTVRSNLAWYQQKPGQPPRLLIYGASTRATG | ADI-41307 | Light chain variable region |
| | | VPARFTGSGSGTEFTLTITSLQSDDFAVYYCHQYNDRPLTFGPGTKVEIK | | (“LC”) amino acid sequence |
| Ab 621 | 1241 | EVQLVESGPGLVKPSQTLSLTCAISGDSVSSNSAAWNWIRQSPSRGLERMGRTYYR | ADI-41308 | Heavy chain variable region |
| | | SKWYDDYAVSVKSRIIINPDTSKNQFSLQLNSVTPEDTAVYYCARGISTFGGVIYALEI | | (“HC”) amino acid sequence |
| | | WGQGTMVTVSS | | |
| Ab 621 | 1242 | SYVLTQPASVSGSPGQSITISCTGLTSDVGGYNFVSWYQQHPGKAPKLIIYDVSHRPS | ADI-41308 | Light chain variable region |
| | | GVSNRFSGSESGNTASLTISGLQAEDEAHYYCSSYTRTSIVVFGGGTKLTVL | | (“LC”) amino acid sequence |
| Ab 622 | 1243 | EVQLLESGPGLVKPSQTLSLTCTVSGGSISSGDYYWSWVRQPPGKGLEWIGNIYHS | ADI-41309 | Heavy chain variable region |
| | | GSTYYKPSLKSRVSISLDTSKNQFSLKLSSVTAADTAIYYCARDGGENYVWGTFRFLD | | (“HC”) amino acid sequence |
| | | VWGQGTTVTVSS | | |
| Ab 622 | 1244 | DIRLTQSPGILSLSPGERATLSCRASQSVSSSYLAWYQQKPGQAPRLLIYGVSSRATG | ADI-41309 | Light chain variable region |
| | | IPDRFSGSGSGTDFTLTINRLEPEDFALYHCQQYGSSPHTFGQGTKVEIK | | (“LC”) amino acid sequence |
| Ab 623 | 1245 | QVQLVQSGVEVKKPGESLKISCRGSGYSFYNYWIAWVRQKPGKGLEYMGTIYLDDS | ADI-41310 | Heavy chain variable region |
| | | DTIYSPSFQGEVTISADKSINTAYLQWNSLKASDTANYYCARQMDFYFDVWGRGTL | | (“HC”) amino acid sequence |
| | | VTVSS | | |
| Ab 623 | 1246 | SYELTQPPSVSVSPGQTARITCSGDPLPRESAYWYQQKPGQAPVVVIFNDIERPLGI | ADI-41310 | Light chain variable region |
| | | PGRFSGSRSGATATLTINGAQAEDEADYYCQSADSRKTFVFGAGTKLTVL | | (“LC”) amino acid sequence |
| Ab 624 | 1247 | QVTLKQSGPALVKPTQTLTLTCTFSGFSLSTKRMGVSWIRQPPGKALEWLARIDWD | ADI-41311 | Heavy chain variable region |
| | | DDKYYSTSLRTRLTISKDTSKNQVVLTMTDMDPVDTATYYCARIQPYTSGGYYSYYF | | (“HC”) amino acid sequence |
| | | DYWGQGTLVTVSS | | |
| Ab 624 | 1248 | DIQVTQSPSSLSASIGDRVTITCRASQTIASYLNWYQQKPGKAPKLLIYIASSLQSGVP | ADI-41311 | Light chain variable region |
| | | SRFSGSGSGTDFTLTISTLQPEDFATYYCQQSYGTPWTFGQGTKVEIK | | (“LC”) amino acid sequence |
| Ab 625 | 1249 | QVQLQESGPGLVKPSGTLSLTCAVSGGSISSSNWWNWVRQPPGKGLEWIGEIYHS | ADI-41312 | Heavy chain variable region |
| | | GRTNYNPSLKSRVSISIDKFKSQFSLNLNSVTAADTAVYYCARDLPGTPYDIVPGYYP | | (“HC”) amino acid sequence |
| | | GLRRHDAFDIWGQGTMVTVSS | | |
| Ab 625 | 1250 | QSVLTQPPSASGTPGQRVTMSCSGSSSNIGSDTVNWYQQLPGTAPKLLIYSNNQR | ADI-41312 | Light chain variable region |
| | | PSGVPDRFSGSKSGTSASLAISGLQSEDEADYYCAAWDDSLNGWVFGGGTKLTVL | | (“LC”) amino acid sequence |
| Ab 626 | 1251 | EVQLVESGAEVKKPGASVKVSCKASGYTFNNYDISWVRQAPGQGLEWMGWISTY | ADI-41313 | Heavy chain variable region |
| | | NGNTNYAQKFQGRATMTTDTSTTTAYMELRSLRSDDSAIYYCARVYCGGDCHNPF | | (“HC”) amino acid sequence |
| | | FLYFDLWGRGTLVTVSS | | |
| Ab 626 | 1252 | SYVLTQPLSVSVALGQTARITCGGNNIGSKSVHWYQQKPGQAPLLVIYRDNNRPSG | ADI-41313 | Light chain variable region |
| | | IPERFSGSTSGNTATLTISRAQAGDEADYSCQVWDNSDWVFGGGTKLTVL | | (“LC”) amino acid sequence |
| Ab 627 | 1253 | QVQLVQSGAEVKKPGSSVKVSCKAFGGIFSSYAISWVRQAPGQGLEWMGGIIPIFG | ADI-41314 | Heavy chain variable region |
| | | TTKYAQKFQGRVTITADKSTSTVYMEVSSLRFEESAVYFCARAYCSGGTWYGGADY | | (“HC”) amino acid sequence |
| | | WGQGTLVTVSS | | |
| Ab 627 | 1254 | QSVLTQPPSVSVSPGQTARITCSGDVLPKQYAYWYQQKPGQAPLLVMYKDTERPS | ADI-41314 | Light chain variable region |
| | | GIPERFSGSSSVTAVTLTISGVQAEDEADYYCQSADSTQELFGGGTKLTVL | | (“LC”) amino acid sequence |
| Ab 628 | 1255 | EVQLLESGPGLVKPSETLSLTCAVSGGSISNYYWSWIRQPPGKGLEWIAYISYSGTTN | ADI-41315 | Heavy chain variable region |
| | | YNPSLESRVTISVDTSKNQFSLKLNSVTAADTAVYYCARHEFLVLPDVWGQGTLVTV | | (“HC”) amino acid sequence |
| | | SS | | |
| Ab 628 | 1256 | ETTLIQSPGILSLSPGERATLSCRASQSVSSTFLAWYQQKPGQAPRLLIYAASSRATG | ADI-41315 | Light chain variable region |
| | | IPDRFSGSGSGTDFTLIISRLEPEDFAVYYCQQYRSSPFSFGPGTKVEIK | | (“LC”) amino acid sequence |
| Ab 629 | 1257 | QVQLVQSGGGVVQPGRSLRLSCAASGFTFNNYGMHWVRQAPGKGLEWVAVLSF | ADI-41316 | Heavy chain variable region |
| | | DGINKYYADSARGRFTISRDNSKNTLYLQMNSLRAEDTALYYCAKDRQEYSSGWTH | | (“HC”) amino acid sequence |
| | | DACDIWGQGTMVTVSS | | |
| Ab 629 | 1258 | EIVMTQSPATLSVSPGERATLSCRASQNVNNNLAWYQQNPGQAPRLLIFGASTRA | ADI-41316 | Light chain variable region |
| | | TGIPARFSGSGSGTEFTLTISSLQSEDFAVYYCQQYNNWPRTFGQGTKLEIK | | (“LC”) amino acid sequence |
| Ab 630 | 1259 | EVQLVESGGGLVQPGGSLRLSCEASRFKFSTFWMAWVRQAPGKGLEWVANIKQD | ADI-41317 | Heavy chain variable region |
| | | GSETYYLDSVKGRFTISRDNAKNSLFLQMKSLRAEDTAVYYCAGLWWGDLENWFD | | (“HC”) amino acid sequence |
| | | PWGQGTLVTVSS | | |
| Ab 630 | 1260 | QSVLTQPPSVSGAPGQRVTISCTGSSSNLGTGFDVHWYRQLPGTAPQLLIYGSTNR | ADI-41317 | Light chain variable region |
| | | PSGVPDRFSGSKYGTSASLAITGLQAEDEADYYCQSYDSNLRAYVFGTVTKVTVL | | (“LC”) amino acid sequence |
| Ab 631 | 1261 | EVQLLESGAEVKKPGSSVRVSCKAFGGTFSSYAFSWVRQAPGQGLEWMGGITPM | ADI-41318 | Heavy chain variable region |
| | | FGTENYAPNFQGRVTITADKLTTTVYMELSRLRSEDSAVYYCAREGGRLGTTMGAF | | (“HC”) amino acid sequence |
| | | DMWGQGTMVTVSS | | |
| Ab 631 | 1262 | DIRLTQSPSSLSASVGDRVTITCRASHGISSALAWYQQRPGRVPQVLIFHASTLESGV | ADI-41318 | Light chain variable region |
| | | PSRFSGSGSGTDFTLTISSLQPEDFATYYCQQFNSYPYTFGQGTKVEIK | | (“LC”) amino acid sequence |
| Ab 632 | 1263 | QVQLQESGPGLVKPSQTLSLTCTVSGGSISSGDYYWSWIRQPPGKGLEWIGYIFYSG | ADI-41319 | Heavy chain variable region |
| | | TTYYNPSLKSRVTISLDTSQNQFSLKLSSVTAADTAVYYCARDGDEVDYVWGTRRYL | | (“HC”) amino acid sequence |
| | | DSWGRGTLVTVSS | | |
| Ab 632 | 1264 | EIVLTQSPGTLSLSPGERATLSCRASQSVSSRYLAWYQQKPGQAPRLLIHGASSRAT | ADI-41319 | Light chain variable region |
| | | GIPDRFSGSGSGTDFTLTISRLEPEDFAVYYCLQYGSLPKTFGQGTKVEIK | | (“LC”) amino acid sequence |
| Ab 633 | 1265 | QVQLVQSGVEVKKPGESLKISCRGFGYSAYNYWIAWVRQKPGKGLEYMGTIYLDD | ADI-41320 | Heavy chain variable region |
| | | SDTIYSPSFQGEVTISADRSINTAYLQWNSLKASDTANYYCARQMDFYFDVWGRGT | | (“HC”) amino acid sequence |
| | | LVTVSS | | |
| Ab 633 | 1266 | QSVLTQPPSVSVSPGQTARITCSGDPLPRESAYWYQQKPGQAPVVVIFNDIERPLGI | ADI-41320 | Light chain variable region |
| | | PARFSGSRSGTTVTLTISGAQAEDEADYYCQSADSRKTFVFGPGTKLTVL | | (“LC”) amino acid sequence |
| Ab 634 | 1267 | QVQLVQSGAEVKKPGSSVRVSCKASGGSFSSYATSWVRQAPGQGLEWMGGIIPM | ADI-41322 | Heavy chain variable region |
| | | YDAVNYAQKFQGRVTITADESTTTAYMELSSLRSEDTAVYYCARSSGYTGINFFDY | | (“HC”) amino acid sequence |
| | | WGQGTLVTVSS | | |
| Ab 634 | 1268 | DIQMTQSPSSVSASVGDRVTITCRASQDISSWLAWYQQKPGKAPKLLIYTASSLQSG | ADI-41322 | Light chain variable region |
| | | VPSRFSGSGSGTDFTLTISRLQPEDFATYYCQQANSFPRVTFGGGTKVEIK | | (“LC”) amino acid sequence |
| Ab 635 | 1269 | EVQLLESGGGVVRPGGSLRLSCAASGFTFDDYAMGWVRQAPGKGLEWVSGITW | ADI-41323 | Heavy chain variable region |
| | | NAGSTAYAGSVKGRFTISRDNAKNSLFLQMNSLRAEDTAFYLCARHVDSSGPVARH | | (“HC”) amino acid sequence |
| | | FDYWGQGTLVTVSS | | |
| Ab 635 | 1270 | NFMLTQPHSVSESPGKTVTISCTRSSGSIARNYVQWYQQRPGSAPTIVIYEDNQRPS | ADI-41323 | Light chain variable region |
| | | GVPDRFSGSIDSSSNSASLTISGLKTEDEADYYCQSYDPSNVVFGGGTKLTVL | | (“LC”) amino acid sequence |
| Ab 636 | 1271 | EVQLVESGGGLVQPGGSLRLSCAASGFTVSNNYMRWVRQAPGKGLEWVSVIYSS | ADI-41324 | Heavy chain variable region |
| | | GSTDYADSVKGRFTISRDNSKNTLYLQMNSLRAEDTAVYYCARERTLFYYDSSGFFD | | (“HC”) amino acid sequence |
| | | YWGQGTLVTVSS | | |
| Ab 636 | 1272 | ETTLTQSPGTLSLSPGERATLSCRASQSVDSSYLAWYQQKPGQAPRLLIYGASNRAT | ADI-41324 | Light chain variable region |
| | | GIPDRFSGSGSGTDFTLTISRLEPEDFAVYYCQQYGRSLTFGGGTKLEIK | | (“LC”) amino acid sequence |
| Ab 637 | 1273 | QVQLVQSGAEVKTPGSSVKVSCKASGGTFRSYPITWVRQAPGQGLEWMGTVIPVF | ADI-41340 | Heavy chain variable region |
| | | DTVNYAPKFQGRVSITADESTNTAYMELSSLRSDDSAVYYCARDLGWLRPMTTVTS | | (“HC”) amino acid sequence |
| | | PHFDYWGQGTLVTVSS | | |
| Ab 637 | 1274 | QSVLTQPASVSGSPGQSITISCTGTSSDVGGYDFVSWYQQHPGKAPKLMISEVTDR | ADI-41340 | Light chain variable region |
| | | PSGVSNRFSGSKSGNTASLTISGLQAEDEADYYCTSYTSSRTYVFGTGTKLTVL | | (“LC”) amino acid sequence |
| Ab 638 | 1275 | QVQLVQSGAEVKKPGSSVKVSCKASGGTFSSYATHWVRQAPGQGLEWMGGIIPIF | ADI-41341 | Heavy chain variable region |
| | | GRATYAQKFQGRVTISADESTSTAYMELSSLRSEDTAVYYCARGRDDRSGDHIAFLY | | (“HC”) amino acid sequence |
| | | HYGMDVWGQGSTVTVSS | | |
| Ab 638 | 1276 | QSVLTQPPSVSAAPGQKVSISCSGSSSNIGINHASWYQHLPGTAPKLLIYDNNKRPS | ADI-41341 | Light chain variable region |
| | | GIPDRFSGSKSGTSATLGISGLQTGDEAAYYCGTWDTGLSAVVFGGGTKLTVL | | (“LC”) amino acid sequence |
| Ab 639 | 1277 | QVQLVQSGAEVKKPGSSVKVSCKASGGTLTSYGVSWVRQAPGQGLEWMGGIIPIF | ADI-41342 | Heavy chain variable region |
| | | GTVDYAQKFQGRVTITADEPTSTAYMELSSLTSDDTAVYYCARDPWVSGPVEFYYY | | (“HC”) amino acid sequence |
| | | FDVWGRGTLVTVSS | | |
| Ab 639 | 1278 | DIVLTESPATLSLSPGERATLSCRASQSINNRYLAWYQQKPGQAPRLLIFGASSRATG | ADI-41342 | Light chain variable region |
| | | IPDRFSGSGSGTDFTLTISRLEPEDFAVYYCQQYGSTPPTFGQGTKVEIK | | (“LC”) amino acid sequence |
| Ab 640 | 1279 | EVQLVESGGGLVKPGGSLRLSCAASGFTFSSYYMNWVRQAPGKGLEWVSSISGGS | ADI-41343 | Heavy chain variable region |
| | | SYISYADSVKGRFTISRDNAKNSLYLQMNSLRAEDTAVYYCARVDTPMVRGYYFDY | | (“HC”) amino acid sequence |
| | | WGQGTLVTVSS | | |
| Ab 640 | 1280 | QSVLTQPPSVSGAPGRRVTISCTGSSSNIGAGYDVHWYQQLPGTAPKLLIFANSNRP | ADI-41343 | Light chain variable region |
| | | SGVPDRFSGSKSGTSASLAITGLQAEDEADYYCQSYDSSLSGSVFGGGTKVTVL | | (“LC”) amino acid sequence |
| Ab 641 | 1281 | EVQLVESGGGLVKPGGSLRLSCAASGSSFSSYYMNWVRQAPGKGLEWVSSISSSST | ADI-41344 | Heavy chain variable region |
| | | YIDYADSVKGRFTISRDNAKNSLFLQMNSLRAEDTAVYYCARVSSPMIRGYYLDYW | | (“HC”) amino acid sequence |
| | | GQGTLVTVSS | | |
| Ab 641 | 1282 | QPVLTQPPSVSGAPGQRVTISCTGSSSNIGAGYDVHWYQQLPGTAPKLVIHGNSN | ADI-41344 | Light chain variable region |
| | | RPSGVPDRFSGSKSGTSASLAITGLQGEDEADYYCQSYDSSLSGSVFGGGTKLTVL | | (“LC”) amino acid sequence |
| Ab 642 | 1283 | EVQLVQSGAEVRKPGESLKISCKGSGYNFASYWIAWVRQMPGKGLEWMGIIFPGD | ADI-41345 | Heavy chain variable region |
| | | SDTRYSPSFQGQVTISVDKSISTAYLQWSSLKASDTAIYYCATSKYTFGYLDWGQGTL | | (“HC”) amino acid sequence |
| | | VTVSS | | |
| Ab 642 | 1284 | NFMLTQPHSVSESPGKTVTISCTRSSGSIASNYVQWYQQRPGSAPTTVIYEDNQRP | ADI-41345 | Light chain variable region |
| | | SGVPDRFSGSIDSSSNSASLTISGLKTEDEADYYCQSYDTSNQVFGTGTKVTVL | | (“LC”) amino acid sequence |
| Ab 643 | 1285 | QVQLVQSGPEVKKPGESLKISCTLSASGLTTYWIGWVRQMPAKGLEWMGIIFPGD | ADI-41346 | Heavy chain variable region |
| | | SDTRYSPSFQGQVTISADKSTNTAYLQWSGLKASDTAIYYCATLQTPVTGLDQWGQ | | (“HC”) amino acid sequence |
| | | GTLVTVSS | | |
| Ab 643 | 1286 | NFMLTQPHSVSESPGKTVTISCTRSSGNIARSYVQWYQQRPGSAPTTVIHEDDQRP | ADI-41346 | Light chain variable region |
| | | SGVPDRFSGSIDTSSNSASLTISGLKTEDEADYYCQSYDPSNYVFGTGTKVTVL | | (“LC”) amino acid sequence |
| Ab 644 | 1287 | EVQLVESGPGLVKPSGTLSLTCAVSGGSVSSDNWWSWVRQPPGKGIEWIGEIYPS | ADI-41347 | Heavy chain variable region |
| | | GGTNYNPSLNSRVTISVDKSKNQFSLKLNSVTAADTAIYYCARAPFDSSGYHSNSVW | | (“HC”) amino acid sequence |
| | | GQGTLVTVSS | | |
| Ab 644 | 1288 | ETTLTQSPLSLPVTPGEPASISCRSSQSLLHSNGHNYLDWYVQKPGQSPQLLIYLSSN | ADI-41347 | Light chain variable region |
| | | RASGVPDRFSGSGSGTDFTLRISRVEAEDVGVYYCMQPLQTPQTFGQGTKVEIK | | (“LC”) amino acid sequence |
| Ab 645 | 1289 | QVQLQESGPGLVKPSQTLSLTCAVSGGSISSGGYYWSWIRQHPGKGLEWIGYIYYS | ADI-41348 | Heavy chain variable region |
| | | GSTYYNPSLKSPVTISVDTSKNQFSLKLTSVTAADTAVYYCARGDYYFDGSGRTTAAF | | (“HC”) amino acid sequence |
| | | DIWGQGTMVTVSS | | |
| Ab 645 | 1290 | DIQVTQSPSSLSASVGDRVTITCRASQSISTFLNWYQQKPGRAPKLLIYDASNLQSGV | ADI-41348 | Light chain variable region |
| | | PSRVSGSGSGTDFTLTISSLHPEDFATYYCQQSYTTPYTFGQGTKVDIK | | (“LC”) amino acid sequence |
| Ab 646 | 1291 | EVQLLESGGGLVQPGRSLRLSCTGSGFTFGDYAMNWVRQAPGKGLEWVGLIRSKD | ADI-41349 | Heavy chain variable region |
| | | YGGTTEFAASLKGRLTISRDDSKSIAYLQMHSLKTEDSAVYYCTRAHLTDYTDINGYQ | | (“HC”) amino acid sequence |
| | | YYFDYWGQGSPVTVSS | | |
| Ab 646 | 1292 | DIQMTQSPSSLSASVGDRVTITCQASQDISNFLNWYQQRPGKAPKLLIHDASNLET | ADI-41349 | Light chain variable region |
| | | GVPSRFSGSGSRTEFTFTISSLQPEDIGTYYCQHYDNFPYTFGQGTKVEIK | | (“LC”) amino acid sequence |
| Ab 647 | 1293 | EVQLVESGAGLVQPGGSLRLSCAASGFTFSTYAVSWVRQAPGKGLEWVSAISGSG | ADI-41350 | Heavy chain variable region |
| | | ASTYFADSVKGRFTISRDNSKNTLYLQMNSLRAEDTAVYYCAKARLELRPYYYGMD | | (“HC”) amino acid sequence |
| | | VWGQGTTVTVSS | | |
| Ab 647 | 1294 | QPVLTQPASVSGSPGQSITISCTGTSSDVGGYNFVSWYQQHPGKAPKLIIYEVSNRP | ADI-41350 | Light chain variable region |
| | | SGVSNRFSGSKSGNTASLTISGLQAEDEADYYCSSSTLSTTYVFGTGTKVTVL | | (“LC”) amino acid sequence |
| Ab 648 | 1295 | QVQLVQSGGGLVQPGGSLRLSCSASGFTFSSKSMHWVRQAPGKGLEYVSAIRSDG | ADI-41351 | Heavy chain variable region |
| | | VSTYYGDSVKGRFTVSRDNAKNTVYLRMSSLRREDTAVYYCVKGPYGDFQYNWFD | | (“HC”) amino acid sequence |
| | | TWGQGTLVTVSS | | |
| Ab 648 | 1296 | ETTLIQSPATLSVSPGERATLSCRASQSVSSNLAWYQQKPGQAPRLLIYGASIRATGI | ADI-41351 | Light chain variable region |
| | | PARFSGSGSGTEFTLTISSLQSEDFAVYYCQQYDNWPPGDTFGQGTKVEIK | | (“LC”) amino acid sequence |
| Ab 649 | 1297 | EVQLVESGGGLVQPGGSLRLSCAASGFTFSSYRMNWVRQAPGKGLEWVSYIDISSS | ADI-41352 | Heavy chain variable region |
| | | TIYYADSVKGRFTISRDNAKNSLYLQMNSLRAEDTAVYYCARDQLVWEPLIRNHYYY | | (“HC”) amino acid sequence |
| | | AMDVWGQGTTVTVSS | | |
| Ab 649 | 1298 | EIVMTQSPDSLAVSLGERATINCKSSQSVLYSSNNKNYLAWYQQKPGQPPKLLIYW | ADI-41352 | Light chain variable region |
| | | ASTRESGVPDRFSGSGSGTDFTLTISSLQAEDVAVYYCQQYYSSPPTFGQGTKVEIK | | (“LC”) amino acid sequence |
| Ab 650 | 1299 | EVQLVESGVEVKKPGESLKISCRGSGYSFHNYWIAWVRQKPGKGLEYMGTIYVDDS | ADI-41353 | Heavy chain variable region |
| | | DTIYSPSFQGEVTISADKSINTAYLQWNSLKASDTANYYCARQMDFYFDVWGRGTL | | (“HC”) amino acid sequence |
| | | VTVSS | | |
| Ab 650 | 1300 | SYELTQPPSVSVSPGQTARITCSGDPLPRESAYWYQQKPGQAPVVVIFNDIERPLGI | ADI-41353 | Light chain variable region |
| | | PERFSGSRSGTTVTLTISGAQAEDEADYYCQSADSRKTFVFGSGTKLTVL | | (“LC”) amino acid sequence |
| Ab 651 | 1301 | EVQLLESGGGLVQPGGSLRLSCAASGFTFSSYAMSWVRQAPGKGLEWVSGISGSG | ADI-41354 | Heavy chain variable region |
| | | GTTYYADSVKGRFTISRDNSKNTLYLQMNSLRAEDTAVYYCAKDSPVNINCGGDCD | | (“HC”) amino acid sequence |
| | | VAYWGQGTLVTVSS | | |
| Ab 651 | 1302 | EIVMTQSPSSLSASVGDTVTITCQASQDISYSLNWYQQKPGKAPNLLIFDASHLQTG | ADI-41354 | Light chain variable region |
| | | VPSRFSGGGDGKHFSFTISSLQPEDVATYYCQQYDSLMYTFGQGTKVEIK | | (“LC”) amino acid sequence |
| Ab 652 | 1303 | EVQLVESGGGLVKPGGSLRLSCTASGFTFSDYYMNWIRQAPGKGLEWVSYISGDG | ADI-41355 | Heavy chain variable region |
| | | NTIYYTDSVKGRFTISRDNAKNSLFLQMNSLRGEDSAVYYCAGPVRGYTYGIFDYW | | (“HC”) amino acid sequence |
| | | GQGALVTVSS | | |
| Ab 652 | 1304 | YYVLTQPPSVSVAPGQAARITCGGNNIGSRSVNWYQQKPGQAPVVVIYGDSVRPS | ADI-41355 | Light chain variable region |
| | | GIPERFSGSNSGNTATLTFSRVEAGDEADYYCQVWETNSDHPVVFGGGTKVTVL | | (“LC”) amino acid sequence |
| Ab 653 | 1305 | QVQLVQSGAEVKKPGASVKVSCKASGYTFTNYDINWVRQATGQGLEWMGWMN | ADI-41356 | Heavy chain variable region |
| | | RNNGNTGYARKFQGRVTMTRNTSISTAYMELSSLRSEDTAVYYCARGGDFYAMDV | | (“HC”) amino acid sequence |
| | | WGQGTTVTVSS | | |
| Ab 653 | 1306 | SYELTQPPSVSVSPGQTASITCSGDKLGDKYASWYQQKPGQSPVLVIYQDTKRPSG | ADI-41356 | Light chain variable region |
| | | VPERFSGSNSGNTATLTISGTQAVDEADYYCQVWDGSIAFGGGTKVTVL | | (“LC”) amino acid sequence |
| Ab 654 | 1307 | EVQLVESGGGLVQPGGSLRLSCAASGFTFSTYGMNWVRQAPGKGLEWVSYIGGS | ADI-41357 | Heavy chain variable region |
| | | GRIIYYADSVKGRFTISRDNAKNSLYLQMNSLRAEDTAVYYCARDQHIVLVTGSTPD | | (“HC”) amino acid sequence |
| | | YWGQGTLVTVSS | | |
| Ab 654 | 1308 | EIVLTQSPSSLSASVGDRVTITCRASHAISNYLAWFQQKPGKAPKSLIYAASTLQSGV | ADI-41357 | Light chain variable region |
| | | PSKFSGSGSGTDFTLTISSLQPEDFATYYCQQYSSYPLTFGGGTKVEIK | | (“LC”) amino acid sequence |
| Ab 655 | 1309 | EVQLVESGGGLVKPGGSLRLSCEASGFTLTSYSMNWVRQAPGKGLEWVSSISSSST | ADI-41358 | Heavy chain variable region |
| | | YIHYADSVKGRFTISRDNAKNSLYLQMNSLRAEDTAVYYCARDKVMVTKYNGMDV | | (“HC”) amino acid sequence |
| | | WGQGTTVTVSS | | |
| Ab 655 | 1310 | QSVLTQPPAVSGAPGQRVTISCTGSSSNIGAGHDVHWYQQLPGTAPKLLIYGNSNR | ADI-41358 | Light chain variable region |
| | | PSGVPDRFSGSKSGTSASLAITGLQAGDEADYYCQSYDSSLSGSLFGGGTKLTVL | | (“LC”) amino acid sequence |
| Ab 656 | 1311 | EVQLVESGGGLVKPGGSLRLSCAASGFTISGYSMDWVRQAPGKGLEWVSSISSSSS | ADI-41359 | Heavy chain variable region |
| | | YIHYADSVKGRFTISRDNAKNSLYLQMNSLRAEDTAVYYCATNPREGGAFDIWGQ | | (“HC”) amino acid sequence |
| | | GTTVTVSS | | |
| Ab 656 | 1312 | QSVLTQPPSMSGAPGQRVTISCTGSSSNIGAGYDVHWYQQLPGTAPKLLIYNNSNR | ADI-41359 | Light chain variable region |
| | | PSGVPDRFSASKSGTSASLAITGLQAEDEADYYCQSYDSSLSGYVFGTGTRVTVP | | (“LC”) amino acid sequence |
| Ab 657 | 1313 | EVQLVESGGGLVQPGGSLRLSCAASGLTFSRYSMNWVRQAPGKGLEWVSYISSTG | ADI-41360 | Heavy chain variable region |
| | | RRIQYADSVKGRFTISRDDGKNSLYLQMNSLRAEDTAVYYCARDPLNYHDNTAYW | | (“HC”) amino acid sequence |
| | | SYWGQGTLVTVSS | | |
| Ab 657 | 1314 | NFMLTQPHSVSESPGKTVTISCTRSSGSIASNYVQWYQQRPGSAPTTVIYEDNQRP | ADI-41360 | Light chain variable region |
| | | SGVPDRFSGSIDSSSNSASLTISGLKTEDEADYYCQSYDSSNPLVFGGGTKLTVL | | (“LC”) amino acid sequence |
| Ab 658 | 1315 | QVQLQESGGGVVQPGRSLRLSCAASGFAFSDYAMDWVRQAPGKGLEWVAVISFD | ADI-41361 | Heavy chain variable region |
| | | GSNKFYADSVKGRFTISRDNSENTLFLQMNSLRAEDTAVYYCVRDFVPCSGATCYLP | | (“HC”) amino acid sequence |
| | | PVYWGRGTLVTVSS | | |
| Ab 658 | 1316 | EIVLTQSPATLSVSPGERATLSCRASQSVSSDLAWYQQKPGQAPRLLIYGASTRATGI | ADI-41361 | Light chain variable region |
| | | PARFSGSGSGTEFTLTISRLQSEDFAVYFCQQYNNWPSWTFGQGTKVEIK | | (“LC”) amino acid sequence |
| Ab 659 | 1317 | EVQLVESGGGLVQPGGSLRLSCAASGFTFSDHWMNWVRQTPGKGLEWVANIKP | ADI-41362 | Heavy chain variable region |
| | | DGRETYYVDSVKGRFTISRDNSKKSVYLQMNSLRAEDTAVYYCVRDGHIVVVTAVP | | (“HC”) amino acid sequence |
| | | PGFFDLWGRGTLVTVSS | | |
| Ab 659 | 1318 | DIQVTQSPSSLSASVGDRVTITCQASQDLTKYLNWYQQKPGKAPKLLIYDISNLETG | ADI-41362 | Light chain variable region |
| | | VPSRFSGSGFGTEFTLTISSLQPEDVATYYCQQYQNLPYTFGQGTKVEIK | | (“LC”) amino acid sequence |
| Ab 660 | 1319 | QVQLVQSGAEVKKPGSSVKVSCKASGGTFSSYAITWVRQAPGQGLEWMGGIIPLF | ADI-41363 | Heavy chain variable region |
| | | GTAKYAQQFQGRVTITADESTSTAYMELSSLRSEDTAVYYCARDGEVCTNGFCWFL | | (“HC”) amino acid sequence |
| | | DWGLGTLVTVSS | | |
| Ab 660 | 1320 | DIRVTQSPSSLSASVGDRVTITCQASQDISNYLNWYQQKPGKAPKLLIYDASKLETG | ADI-41363 | Light chain variable region |
| | | VPSRFSGSGSGTDFTFTISSLQPEDIATYYCQNYGNFPHFGGGTKLEIK | | (“LC”) amino acid sequence |
| Ab 661 | 1321 | EVQLLESGAEVKKPGASVKVSCKASGYTFTDHSIHWVRQAPGRGLEWMGWFNPH | ADI-41364 | Heavy chain variable region |
| | | TGVTDYAQKFQGWVTMTSDTSISTAYMELSSLKSDDTAIYFCARDQWETDGAYFL | | (“HC”) amino acid sequence |
| | | DYWGQGTLVTVSS | | |
| Ab 661 | 1322 | QSALTQPASVSGSPGQSITISCTGTSSDVGNFKLVSWYQQHPGKAPKLMIYEGNKR | ADI-41364 | Light chain variable region |
| | | PSGVSNRFSGSKSGNTASLTISGLQAEDEADYYCCSSAVSSTFFGTGTKLTVL | | (“LC”) amino acid sequence |
| Ab 662 | 1323 | EVQLVESGGGLVKPGGSLRLSCATSGFTFSDYYMTWIRQAPGKGLEWVSYISSSGG | ADI-41365 | Heavy chain variable region |
| | | YTNYADSVRGRFTISRDNAKRSLYLQMNSLRAEDTAVYYCARVEFSSGDVPSLFDS | | (“HC”) amino acid sequence |
| | | WGQGTLVTVSS | | |
| Ab 662 | 1324 | QSVLTQPPSVSGAPGQRVTISCTGSSSNLGAGYHVHWYQQFPGTAPKPLIYGNTN | ADI-41365 | Light chain variable region |
| | | RPSGVPDRFSGSKSGTSASLAITGVQAEDEADYYCQSYDYSLSGWVFGGGTKLTVL | | (“LC”) amino acid sequence |
| Ab 663 | 1325 | QVQLVQSGAEVKKPGESLKISCKASGYSSTTYWIGWVRQISGKGLEWMGIIYPGDS | ADI-41366 | Heavy chain variable region |
| | | DTRYSPSFQGQVTISADRSTKTAYLQWSSLKASDTAMYYCGTSGFGVATPFDYWG | | (“HC”) amino acid sequence |
| | | QGTLVTVSS | | |
| Ab 663 | 1326 | NFMLTQPHSVSESPGKTVTISCTRTSGSIAGNYVHWYQQRPGSAPTTVIYEDNQRP | ADI-41366 | Light chain variable region |
| | | SGVPDRFSGSIDRSSNSASLTISGLKTEDEADYYCQSYASGIHGVFGGGTKVTVL | | (“LC”) amino acid sequence |
| Ab 664 | 1327 | QVQLVQSGAAVKRPGASVKVSCKASGYTFSTNALHWVRQAPGQSLEWMGWINT | ADI-41367 | Heavy chain variable region |
| | | DNGIPKYSERFHGRVTFTRDTSASTVYMDLSGLRSGDTAVYYCARDGSSGHWLGLS | | (“HC”) amino acid sequence |
| | | VLDNWGQGTLVTVSS | | |
| Ab 664 | 1328 | QSALIQPASVSGSPGQSITISCTGTSDDVGAYNYVSWYQQYPNKAPKLVIYEVSHRP | ADI-41367 | Light chain variable region |
| | | SGVSNRFSGSKSGNTASLTISGLQAEDEADYYCSSYTRSATPYVFGTGTKLTVL | | (“LC”) amino acid sequence |
| Ab 665 | 1329 | EVQLVESGGGVVQPGRSLRLSCAASGFIFRNYGMHWVRQAPGKGLEWVAGTSFE | ADI-41368 | Heavy chain variable region |
| | | GRNKDYGHSVKGRFTISRDNSKDTLYLQMNSLRPEDTAVYSCAKGSSLQWSHLDW | | (“HC”) amino acid sequence |
| | | YFDLWGRGTLVTVSS | | |
| Ab 665 | 1330 | DIVMTQSPSTLSASVGDRVTITCRASQSFSSWLAWYQQKPGKAPNLLIYDASTLESG | ADI-41368 | Light chain variable region |
| | | VPSRFSGSGSGTEFTLTISSLQPDDFATYYCQQERTFGQGTKVEIK | | (“LC”) amino acid sequence |
| Ab 666 | 1331 | EVQLVQSGGGVVQPGRSLRLSCAASGFTFSSYGMHWVRQAPGKGLEWVAVISHD | ADI-41369 | Heavy chain variable region |
| | | GNNKYYGDSVKGRFTISRDNSKNTLHLQMNSLRGDDTAVYYCGKDPLKGDCSGGS | | (“HC”) amino acid sequence |
| | | CYQRIDYWGQGTLVTVSS | | |
| Ab 666 | 1332 | NFMLTQPHSVSESPGKTVTISCTGSSGRIASNYVQWYQQRPGSAPATVIYDDNQRP | ADI-41369 | Light chain variable region |
| | | SGVPDRFSGSIDSSSNSASLTISGLKTEDEADYYCQSYDRSNHVIFGGGTKLTVL | | (“LC”) amino acid sequence |
| Ab 667 | 1333 | EVQLVESGGGLVKPGGSLRLSCAASGFTFSGFSMNWVRQAPGKGLEWVSSISSTSR | ADI-41370 | Heavy chain variable region |
| | | YIYYADSVQGRFTISRDNAKNSLYLQMNSLRAEDTAVYYCARDPGGSASFVPYYYG | | (“HC”) amino acid sequence |
| | | MDVWGQGATVTVSS | | |
| Ab 667 | 1334 | SYELIQPPSVSVSPGQTARITCSGDALPNQYVYWYQKKPGQAPVLVIYKDTEGPLGI | ADI-41370 | Light chain variable region |
| | | PERFSGSSSGTTVTLTISGVQAEDEADYYCQSADSSGTYPYVVFGGGTKLTVL | | (“LC”) amino acid sequence |
| Ab 668 | 1335 | QVQLQESGPRLVKPSQTLSLTCTVSGGSITTGEHYWSWIRQSPGRGLEWIGYISYSG | ADI-41371 | Heavy chain variable region |
| | | STYYNPSLKSRVTISVDTSKTRISLNLRSVTAADSAVYYCARDQEDSDYIWGSSRVFDI | | (“HC”) amino acid sequence |
| | | WGQGTMVTVSS | | |
| Ab 668 | 1336 | ETTLTQSPGTLSLSPGERATLSCRASQNVGNNYLAWYQQKPGQAPRVLIQDASTRA | ADI-41371 | Light chain variable region |
| | | TGIPDRFSGSGSGTDFTLTISRLEPEDFAVYHCQQYGSAPWTFGQGTKVEIK | | (“LC”) amino acid sequence |
| Ab 669 | 1337 | QVQLVQSGAEVKKPGSSVKVSCKASGGISSSYAISWVRQAPGQGLEWMGGIIPIFG | ADI-41372 | Heavy chain variable region |
| | | TTNYAQKFQGRVTITADKSTSTVYMELSSLRSEDSAVYFCARAYCSGGTCYGGADY | | (“HC”) amino acid sequence |
| | | WGQGTLVTVSS | | |
| Ab 669 | 1338 | SYELTQPPSVSVSPGQTARITCSGDVLPKQYAYWYQQKLGQAPLLVMYKDTERPSG | ADI-41372 | Light chain variable region |
| | | IPERFSGSSSVTAVTLTISGVQAEDEADYYCQSADSTQELFGGGTKLTVL | | (“LC”) amino acid sequence |
| Ab 670 | 1339 | QVTLKESGGGLVKPGGSLRLSCAASGFTFSDYFMTWIRQAPGKGLEWVSYISSNSG | ADI-41373 | Heavy chain variable region |
| | | YTKYAEDVKGRFSISRDNAKKTLFLQLNSLSAEDTAVYYCARVEFSSGDVPSLFDLW | | (“HC”) amino acid sequence |
| | | GQGTLVTVSS | | |
| Ab 670 | 1340 | QSVLTQPPSVSGAPGQRVTISCTGSSSNIGAGYHVHWYQQLPGTAPKVLIHGNNN | ADI-41373 | Light chain variable region |
| | | RPSGVPDRFSGSRSGTSASLAITGLQAEDEADYYCQSYDFSLSGWVFGGGTKLTVL | | (“LC”) amino acid sequence |
| Ab 671 | 1341 | QVQLVQSGAEVKKPGSSVKVSCKASGGTFSNHAIDWVRQAPGQGLEWMGRIIPM | ADI-41374 | Heavy chain variable region |
| | | VGLATYTRKFQGRVTISVDKSTSTAYMELSSLISDDTAVYYCARRTPEMAWGYWG | | (“HC”) amino acid sequence |
| | | QGTTVTVSS | | |
| Ab 671 | 1342 | DIVMTQTPSSLSASVGDRVTITCQASQDIRYYVNWYQQKPGKAPKLLIYDASTLETG | ADI-41374 | Light chain variable region |
| | | VPSRFSGRGSGTDFTLIISSLQPEDIATYYCQQYGDLPTFGQGTRLEIK | | (“LC”) amino acid sequence |
| Ab 672 | 1343 | QVQLVQSGGGVVQPGRSLRLSCATSGFTFSDYAIHWVRQAPGKGLEWVAVISYDG | ADI-41375 | Heavy chain variable region |
| | | SHKYYGDSVKGRFTISRDNSKNTLYLQMNSLRPEDTAVYYCARSRSGSYYSSAIDNW | | (“HC”) amino acid sequence |
| | | GQGTLVTVSS | | |
| Ab 672 | 1344 | DIQMTQSPSSLSASVGDRVTIACRASQGISSALAWYRQRPGKAPELLIYDASTLESG | ADI-41375 | Light chain variable region |
| | | VPSRFSGYGAGTDFTLTISSLQPEDFATYYCQQFNSYPSITFGQGTKVEIK | | (“LC”) amino acid sequence |
| Ab 673 | 1345 | QVQLQESGGGVVQPGRSLRLSCAASGFTFSSYAMHWVRQAPGKGLEWVAVISFD | ADI-41376 | Heavy chain variable region |
| | | GTANKYYADSVKGRFAISRDNSKNTLYLQMNSLRAEDTAVYYCAKDDAIYSGGWV | | (“HC”) amino acid sequence |
| | | GDAFDLWGQGTMVTVSS | | |
| Ab 673 | 1346 | EIVLTQSPATLSVSPGERATLSCRASQGVNSNLAWYQQKPGQAPRLLMYGASTRAT | ADI-41376 | Light chain variable region |
| | | GIPARFSGSGSETEFTLTISSLQSEDFAVYYCQQYNNWPRTFGQGTKVDIK | | (“LC”) amino acid sequence |
| Ab 674 | 1347 | QVQLQQSGPGLVKPSQTLSLTCAISGDSVSSDSATWNWIRQSPSRGLEWLGRAYY | ADI-41377 | Heavy chain variable region |
| | | RSKWYYDYAPSVKSRLTINPDTSKNQFSLQLTSVTPQDTAVYFCARDLPPLEYFDGS | | (“HC”) amino acid sequence |
| | | GYYFLDHWGQGTLVTVSS | | |
| Ab 674 | 1348 | SYELTQPPSVSVAPGQTARLSCGGHNIGSKSVQWYQQKPDQAPVLVVYDDHDRPS | ADI-41377 | Light chain variable region |
| | | GIPDRFSGSNSGDMATLTISRVEAGDEADYYCQVCESGRDPMVFGGGTKVTVL | | (“LC”) amino acid sequence |
| Ab 675 | 1349 | EVQLVESGPGLVKPSGTLSLTCAVSGDSISSSNWWSWVRQPPGKGLEWIGEVSHS | ADI-41378 | Heavy chain variable region |
| | | GNTDYNPSLKSRVTISVDKSKNQFSLKLSSVTAADTAVYYCARPSPCSGGSCYWFFD | | (“HC”) amino acid sequence |
| | | LWGRGTLVTVSS | | |
| Ab 675 | 1350 | DIRLTQSPSSLSASVGDRVTITCRASQTINAYLNWYQQRPGKAPNLLIYAASSLQSGV | ADI-41378 | Light chain variable region |
| | | PSRFSGSGSGTDFTLTISSLQPEDFATYYCQQSYKTAYTFGQGTKVEIK | | (“LC”) amino acid sequence |
| Ab 676 | 1351 | QVQLVQSGAEVKKPGESLKISCKGSGYSFSSFWIGWVRQMPGKGLEWMGIIYPGD | ADI-41379 | Heavy chain variable region |
| | | SDTRYSPSFKGQVTISADTSISTAYLQWSSLKASDTAMYYCAKSIVGSTGSFDPWGQ | | (“HC”) amino acid sequence |
| | | GTLVTVSS | | |
| Ab 676 | 1352 | DIQMTQSPSSLSASVGDRVTITCQASQDISNFLNWYQQKPGKAPKLLIYDASNLRT | ADI-41379 | Light chain variable region |
| | | GVPSRFSGSGSGTEFTFTISSLQPEDIATYYCQQYHDLPPLTFGGGTKVDIK | | (“LC”) amino acid sequence |
| Ab 677 | 1353 | QVQLVQSGAEVKKPGESLKISCKGSGYSFTSYWIGWVRQMPGKGLEWMGIIYPGD | ADI-41380 | Heavy chain variable region |
| | | SDTRYSPSFQGQVTISADKSISTAYLQWSSLKASDTAMYYCASSRAYYDILTGYYVAS | | (“HC”) amino acid sequence |
| | | AETQTKAAFDIWGQGTTVTVSS | | |
| Ab 677 | 1354 | DIQVTQSPSSLSASVGDRVTITCQASQDISNYLNWYQQKPGKAPKLLIYDASNLETG | ADI-41380 | Light chain variable region |
| | | VPSRFSGSGSGTDFSFTISSLQPEDIATYYCQQYDNLITFGQGTKVEIK | | (“LC”) amino acid sequence |
| Ab 678 | 1355 | QVQLQESGPGLVKPSQTLSLTCTVSGDSISGGEHYWSWIRQPPGKGLEWIGSIYYS | ADI-41381 | Heavy chain variable region |
| | | GTTYYNPSLKSRLTVSVDTFKNQFSLMLSYVTAADTAVYYCARDASPAYHDYIWGS | | (“HC”) amino acid sequence |
| | | CRYFDKWGQGTLVTVSS | | |
| Ab 678 | 1356 | EIVLTQSPGTLSLSPGERATLSCRASQSVSSNYLAWYQQKPGQAPRILIHGASSRATG | ADI-41381 | Light chain variable region |
| | | IPDRFSGSGSGTDFTLTVSRLEPEDFAVYYCQQYGSTPYTFGQGTKVEIK | | (“LC”) amino acid sequence |
| Ab 679 | 1357 | EVQLVESGGGLVQPGRSLRLSCAASGFTFDDYAMHWVRQAPGKGLEWVSGISWS | ADI-41382 | Heavy chain variable region |
| | | GDTRGYAESVKGRFTITRDNAKKYLYLQMNSLRAEDTAFYYCAKDAYYFGSGNEKF | | (“HC”) amino acid sequence |
| | | YYGMDVWGQGTTVTVSS | | |
| Ab 679 | 1358 | DIVLTQTPATLSVSPGERATLSCRASQNVISNLAWYQQKPGQAPRLLIYGASTRATGI | ADI-41382 | Light chain variable region |
| | | PARFSGSGSGTEFTLTISSLQSEDFAVYYCQQYNNWPQTFGQGTKVEIK | | (“LC”) amino acid sequence |
| Ab 680 | 1359 | QVQLVQSGAEVKKPGSSVRVSCKASGGTFSRYAISWVRQAPGQGLEWMGGVIPR | ADI-41384 | Heavy chain variable region |
| | | FDKTNYAQKFQGRVMITADKSTSTAYMELSSLRSDDTAVYYCAGDRLDTKITHTWY | | (“HC”) amino acid sequence |
| | | GFGDFWGQGTTVTVSS | | |
| Ab 680 | 1360 | EIVLTQSPGTLSLSPGERATLSCRASQSVTSNFLAWYQQRPGQAPRLLIYGASVRAID | ADI-41384 | Light chain variable region |
| | | IPDRFSGSGSGTDFTLTISRLEPEDFAVYYCQQYGDPFRTFGQGTKVEIK | | (“LC”) amino acid sequence |
| Ab 681 | 1361 | EVQLVESGGGVVQPGRSLRLSCAASGFTFSSYGMHWVRQAPGKGLEWVAVIWYD | ADI-41385 | Heavy chain variable region |
| | | GNNEKYADSVKGRFTISRDNSKNTLYLQMNSLRAEDTAVYYCARPTQKYSSSWYW | | (“HC”) amino acid sequence |
| | | EDSIDYWGQGTLVTVSS | | |
| Ab 681 | 1362 | QSVLTQPPSVFGAPGQRVTISCTGSSSNIGAGYPVHWYQQLPGTAPKLLIYGNSNR | ADI-41385 | Light chain variable region |
| | | PSGVPDRFSGSKSGTSASLAITGLQAEDEADYYCQSYDSSLSGGVVFGGGTKLTVL | | (“LC”) amino acid sequence |
| Ab 682 | 1363 | QVQLVQSGAEVKKPGASVKVSCKASGYTFTGNYIHWVRQAPGQGLEWMGGINP | ADI-41386 | Heavy chain variable region |
| | | NSGATNYARKFQGRISMTRDTSINTAYMEVSSLRSDDTATYYCARDAPPVVIPAAIH | | (“HC”) amino acid sequence |
| | | WFDAWGQGTLVTVSS | | |
| Ab 682 | 1364 | SYELTQPPSASGTPGQRVTISCSGSSSNIGRNTVNWYQQFSGTAPRLLIYRTNQRPS | ADI-41386 | Light chain variable region |
| | | GVPDRFSGSKSGTSASLVISGLQSEDEADYYCASWHDTLNDVVFGGGTKLTVL | | (“LC”) amino acid sequence |
| Ab 683 | 1365 | EVQLVESGGGVVQPGRSLRLSCAASGFTFSNYAIHWVRQAPGKGLEWVAAISYDG | ADI-41389 | Heavy chain variable region |
| | | GNKFYADSVKGRFTISRDNSRNTLYLQMNSLRPEDTAVYYCARDRWELNYGIDVW | | (“HC”) amino acid sequence |
| | | GQGTTVTVSS | | |
| Ab 683 | 1366 | SYELMQPPSVSVSPGQTARITCSGDALPKQYAYWYQQKPGQAPVLVIYKDSERPSG | ADI-41389 | Light chain variable region |
| | | IPERFSGSTSGTTVTLTISGVQAEDEADYYCQSADSSSTFFYVFGTGTKLTVL | | (“LC”) amino acid sequence |
| Ab 684 | 1367 | EVQLVESGGGLVKPGGSLRLSCAASGFSSSSYFMNWVRQAPGKGPEWVSSISGSSS | ADI-41390 | Heavy chain variable region |
| | | FINYADSVKGRFTISRDNAKNSLYLQMNSLRAEDTAVYYCARAVLPAGVGGYWFDS | | (“HC”) amino acid sequence |
| | | WGQGTLVTVSS | | |
| Ab 684 | 1368 | QSVVTQPPSVSGAPGQRVTISCTGSSSNIGAGYDVHWYQHLPGRAPKLLIYGNSNR | ADI-41390 | Light chain variable region |
| | | PSGVPDRFSGSKSGTSASLVITGLQAEDEADYCCQSYDSSLSGAVFGGGTQLTVL | | (“LC”) amino acid sequence |
| Ab 685 | 1369 | EVQLLESGPGLVKPSETLSLTCTVSGGSISGYYWSWIRQPPGKGLEWIGYIYHSGGST | ADI-41391 | Heavy chain variable region |
| | | NYNPSLKSRVTISVDTSKNQFSLKVSSVTAADTAVYYCARLARVVTTFDFWGQGAL | | (“HC”) amino acid sequence |
| | | VTVSS | | |
| Ab 685 | 1370 | QPVLTQPASVSGSPGQSITISCTGTSSDVGGYNYVSWYQQKPGTAPKLMIFDVSNR | ADI-41391 | Light chain variable region |
| | | PSGVSNRFSGSKSDNTASLTISGLQAEDEADYYCSSYTSSTNLVFGGGTKLTVL | | (“LC”) amino acid sequence |
| Ab 686 | 1371 | EVQLVESGGGVVQPGGSLRLSCAASGFEFRDYAMHWVRQAPGKGLEWVALISYD | ADI-41392 | Heavy chain variable region |
| | | GSKIHYADSVQGRFSISRDNSKNSLYLQMNSLRSEDSAKYYCVQDHWLVPAFWGQ | | (“HC”) amino acid sequence |
| | | GAQVTVSS | | |
| Ab 686 | 1372 | QPVLTQPASVSGSPGQWITISCTGTSSDIGYYDYVSWYQQYPGKAPKLIIYEVSHRPS | ADI-41392 | Light chain variable region |
| | | GVSNRFSGSKSGNTASLSISGLQAEDEADYYCSSYTTSNAGVFGTGTKLTVL | | (“LC”) amino acid sequence |
| Ab 687 | 1373 | QVQLVQSGAEVKKPGESLKISCKGSGYSFTSYWIGWVRQMPGKGLEWMGIIYPGD | ADI-41393 | Heavy chain variable region |
| | | SDTRYSPSFQGQVTISADKSTSTAYLQWSSLKASDSAMYYCARSEFSSSFDFWGQG | | (“HC”) amino acid sequence |
| | | TLVTVSS | | |
| Ab 687 | 1374 | NFMLTQPHSVSESPGKTVTISCTGSSGSIASYYVQWYQLRPGSAPTTVIYEDNQRLS | ADI-41393 | Light chain variable region |
| | | GVPDRFSGSIDSSSNSASLTISGLKTEDEADYYCQSYRSGIPWVFGGGTKLTVL | | (“LC”) amino acid sequence |
| Ab 688 | 1375 | QVQLVQSGAEVKKPGSSVKVSCKASGGTFNTYAISWVRQAPGQGLEWMGGIIPIL | ADI-41394 | Heavy chain variable region |
| | | GVSNYAQRFQGRVTFSADELTNTAYMELSSLRSEDTAVYFCARPVGAYTLGDAFEI | | (“HC”) amino acid sequence |
| | | WGRGTTVTVSS | | |
| Ab 688 | 1376 | QPVLTQSSSASASLGSSVKLTCTLSSGHSDFIIAWHQQQPGKAPRYLMKFEGNGRY | ADI-41394 | Light chain variable region |
| | | SKGSGIPDRFSGSSSGADRCLTISNLQSEDEADYYCETWDSNTHVVFGGGTKLTVL | | (“LC”) amino acid sequence |
| Ab 689 | 1377 | EVQLVESGGGLVNPGGSLRLSCVVSGFAFSSYGMNWVRQAPGKGLEWVSSISASS | ADI-41396 | Heavy chain variable region |
| | | SYIDYADSVKGRFIISRDNAKNSLHLQMNSLRAEDTAVYYCARLGYDSSTYYTNWFD | | (“HC”) amino acid sequence |
| | | PWGRGTLVTVSS | | |
| Ab 689 | 1378 | QSVVTQEPSVSGAPGQRVTISCTGSSSNIGTGYDVHWYQQLPGAAPKLLIYGNSNR | ADI-41396 | Light chain variable region |
| | | PSGVPDRISGSKSGTSASLAITGLQAEDEADYYCQSYDSSLSGYVFGTGTKVTVL | | (“LC”) amino acid sequence |
| Ab 690 | 1379 | EVQLVESGGGLVKPGGSLRLSCAASGFKFSSYYLNWVRQAPGKGLEWVSSISGGSS | ADI-41397 | Heavy chain variable region |
| | | YINYADSVKGRFTISRDNAKNTLDLQMSNLRAEDTAVYYCARVVGATGPLYFDLWG | | (“HC”) amino acid sequence |
| | | RGTLVTVSS | | |
| Ab 690 | 1380 | QSVLTQPPSVSGAPGQRVTISCTGSSSNIGAGYDVHWYQQFPGTAPKLLIYGNNNR | ADI-41397 | Light chain variable region |
| | | PSGVPDRFSGSKSGTSASLAITGLQAEDEADYYCQSYDSSLSGYVFGAGTKVTVL | | (“LC”) amino acid sequence |
| Ab 691 | 1381 | EVQLLESGAEVKKPGASVKVSCKASGYTFTNYGISWVRQAPGQGLEWMGWISAY | ADI-41398 | Heavy chain variable region |
| | | NGNTNYAQKLQGRVTMTTDTSTSTAYMELRSLRSDDTAVYYCARDGGVIAAATLG | | (“HC”) amino acid sequence |
| | | YWGQGTLVTVSS | | |
| Ab 691 | 1382 | EIVLTQSPLSLPVTLGQPASISCRSSQSLVYSDGNTYLSWFQQRPGQSPRRLIYKISNR | ADI-41398 | Light chain variable region |
| | | DSGVPNRFSGSGSGTDFTLKISRVEAEDVGIYYCMQGIYWPPTFGQGTKVEIK | | (“LC”) amino acid sequence |
| Ab 692 | 1383 | QVQLVQSGAEVKKPGASVKVSCKASGYTFTTFAIHWVRQAPGQRLEWMGWINA | ADI-41399 | Heavy chain variable region |
| | | GNGNTKYSQKFQGRVTITRDTSASTAYMELSSLRSEDTAVYYCARPEISSSSLNEKDD | | (“HC”) amino acid sequence |
| | | YWGQGTLVTVSS | | |
| Ab 692 | 1384 | QPVLIQPASVSGSPGQSITISCTGTSSDVGAYDFVSWYQQHPGKAPKFMIYEVSHR | ADI-41399 | Light chain variable region |
| | | PSGVSNRFSGSKSGNTASLTISGLQAEDEADYYCSSYTTSNTLVFGGGTKLTVL | | (“LC”) amino acid sequence |
| Ab 693 | 1385 | EVQLLESGGGLIQPGGSLRLSCAASKFTFSDYEMNWVRQAPGKGLEWLSYISSSGGI | ADI-41400 | Heavy chain variable region |
| | | MYYADSVKGRFTISRDNAKNSLYLQMNSLRAEDTAVYFCARAGRLLSGLDVWGHG | | (“HC”) amino acid sequence |
| | | TTVTVSS | | |
| Ab 693 | 1386 | EIVLTQSPSTLSASVGDRVTITCRASQSISPWLAWYQQKPGKAPKLLIYRASSLETGV | ADI-41400 | Light chain variable region |
| | | PPRFSGSGSGTEFTLTISSLQPDDFATYYCQHYNSYLYSFGQGTKVEIK | | (“LC”) amino acid sequence |
| Ab 694 | 1387 | EVQLLESGGGLVHPGRSLRLSCAASGFTFGDYAMHWVRQAPGKGLEWVSGISWN | ADI-41401 | Heavy chain variable region |
| | | SDTIEYADSVKGRFTISRDNAKNSLYLQMNSLRAEDTALYYCAKDFGSSWEAYFDY | | (“HC”) amino acid sequence |
| | | WGQGTLVTVSS | | |
| Ab 694 | 1388 | DIVLTQSPSYLSASVGDRVTITCRASQSISTYLNWYQQKPGKAPKLLISAASSLQSGVT | ADI-41401 | Light chain variable region |
| | | SRFSGSGSGTDFSLTISSLQPEDFATYYCQQSYSTALTFGGGTKVEIK | | (“LC”) amino acid sequence |
| Ab 695 | 1389 | EVQLVESGGGLVKPGGSLRLSCAASGFTFGTYTMNWVRQAPGKGLEWVSSISSSSS | ADI-41403 | Heavy chain variable region |
| | | HIYYADSVKGRFTISRDNARKALYLQMNSLRPEDTAVYFCARFLGDYGGDGNTYYY | | (“HC”) amino acid sequence |
| | | YYGMDVWGQGTTVTVSS | | |
| Ab 695 | 1390 | EIVMTQSPLSLPVTPGEPASISCRSSQSLLHSNGKNYLDWYLQKPGQSPQLLIHLGS | ADI-41403 | Light chain variable region |
| | | NRASGVPDRFSGSGSGTDFTLQISRVEAEDVGVYYCMQALQTPTFGGGTKLEIK | | (“LC”) amino acid sequence |
| Ab 696 | 1391 | QVQLVQSGAEVKKPGSSVKVSCKASGGTFSSYGISWVRQAPGQGLEWMGGIIPIF | ADI-41404 | Heavy chain variable region |
| | | GTVSYAQKFRGRLTITAHEPTSTAYMDLSSLRSEDTAVYYCARINGRGWELSSLNYY | | (“HC”) amino acid sequence |
| | | YGMDVWGQGTTVTVSS | | |
| Ab 696 | 1392 | EIVLTQSPGTLSLSPGERGTLSCRASQSVASSYLAWYQQKPGQAPRLLIYGATSRATG | ADI-41404 | Light chain variable region |
| | | IPDRFSGSGSGTDFTLTISRLEPEDFAVYYCQQYGSSLFTFGGGTKVDIK | | (“LC”) amino acid sequence |
| Ab 697 | 1393 | EVQLLESGGGLVQPGGSLRLSCAASGFSFSIYSMNWVRQAPGKGLEWISYITSTGSP | ADI-41405 | Heavy chain variable region |
| | | TYYADSVKGRFTISRDNAKNSLYLQMSSLRAEDTAVYYCVTYCSSSSCPAEFDYWGQ | | (“HC”) amino acid sequence |
| | | GTLVTVSS | | |
| Ab 697 | 1394 | EIVLTQSPATLSLSPGERATLSCRASQSVNSYLAWYQQKPGQAPRLLIYDASNRATGI | ADI-41405 | Light chain variable region |
| | | PARFSGSGSGTDFTLTISSLEAEDFAVYYCQHRNNWPALTFGGGTKVEIK | | (“LC”) amino acid sequence |
| Ab 698 | 1395 | EVQLVESGGNLVQPGGSLRLSCAASGFTFSSYVMNWVRQAPGKGLEWVSGISGS | ADI-41406 | Heavy chain variable region |
| | | GGTSYYADSVKGRFTISRDNSNNTLYLQMKSLRAEDTAVYYCAKDPRFQKWLIEGT | | (“HC”) amino acid sequence |
| | | NWFDSWGQGTLVTVSS | | |
| Ab 698 | 1396 | DIQVTQSPSSLSASVGDRVTITCRASQDVSNYLAWFQQKPGTAPKSLIYAASILQSG | ADI-41406 | Light chain variable region |
| | | VPSKFRGSGSGTDFSLTISSLQPEDFATYYCQQYRSFPPTFGGGTKVEIK | | (“LC”) amino acid sequence |
| Ab 699 | 1397 | EVQLVESGGGLVQPGGSLRLSCAASGFTFSSNAMSWVRQAPGKGLEWVSYISGGS | ADI-41407 | Heavy chain variable region |
| | | ATKSYADSVKGRFTISRDNSKNTLYLQMKSLRAEDTAVYYCVGGSAYYSGFDYWGQ | | (“HC”) amino acid sequence |
| | | GTLVTVSS | | |
| Ab 699 | 1398 | DIVMTQSPSSLSASVGDRVTISCRASQDIRNYLAWYQQKPGKVPNLLIYAASTLESG | ADI-41407 | Light chain variable region |
| | | VPSRFSGSGYGTDFTLTISGLQPEDVATYYCQKYDSAPPFTFGPGTKVDIK | | (“LC”) amino acid sequence |
| Ab 700 | 1399 | QVQLVESGAEVKKPGESLKISCRDSGYSFSSFWIGWVRQMPGKGLEWVGIIYPGDS | ADI-41408 | Heavy chain variable region |
| | | DIRYSPSFQGRVTISADKSISTAYLQWRSLKASDSAMYYCARSEKLGSFDRWGQGTL | | (“HC”) amino acid sequence |
| | | VTVSS | | |
| Ab 700 | 1400 | DIQMTQSPSSLSASVGDRVTITCQANRDISNCLNWYQQRPGKAPELLIYDASYLETG | ADI-41408 | Light chain variable region |
| | | VPSRFTGSGSGTDFTFTISSLQPEDIATYYCQQYDNLLFTFGPGTKVEIK | | (“LC”) amino acid sequence |
| Ab 701 | 1401 | QVQLVQSGAEVKKPGASVKVSCKASGYTFTNYGISWVRQAPGQGLEWMGWISA | ADI-41409 | Heavy chain variable region |
| | | YNGNTNYAQKFQDRVTMTTDTSTSTAYMELRSLRYDDTAVYYCARDTPGEYASA | | (“HC”) amino acid sequence |
| | | MFDHWGQGTLVTVSS | | |
| Ab 701 | 1402 | DIVMTQSPLSLPVTLGQPASISCRSSQSLVYSDGNTYLSWFQQRPGQSPRRLIYKVS | ADI-41409 | Light chain variable region |
| | | NRDSGVPDRFSGSGSGTDFTLKISGVEAEDVGVYYCMQGTHWPPTFGQGTKLEIK | | (“LC”) amino acid sequence |
| Ab 702 | 1403 | EVQLLESGGGLAQPGRSLKVSCAASGVTVTSTYMGWVRQAPGKGLQWVSVIYSD | ADI-41414 | Heavy chain variable region |
| | | GTTYYADSVKGRFTISRDHYKNTLYLQMNSLRAEDTALYYCARGNRRTDFGYWGQ | | (“HC”) amino acid sequence |
| | | GTLVTVSS | | |
| Ab 702 | 1404 | EIVMTQSPSTLSASVGDRVTITCRASQTISNWLAWYQQKPGKAPKLLIYQASTLESG | ADI-41414 | Light chain variable region |
| | | VPSRFSGSGSGTEFTLTISSLQPDDFATYYCQQYNTYYTFGPGTKVEIK | | (“LC”) amino acid sequence |
| Ab 703 | 1405 | QVTLKESGPALVKPTQTLTLICTFSGFSLSTSRTRVSWIRQPPGKALEWLARVDWD | ADI-41415 | Heavy chain variable region |
| | | DDKFYNPVLKTRLSISKDPSKNQVVLTMTNVDPVDTATYYCVRMAHYGSGGYYVE | | (“HC”) amino acid sequence |
| | | YFQDWGQGTLVTVSS | | |
| Ab 703 | 1406 | DIQLTQSPASLSASAGDRVTITCRASQNINRYLNWYQQQSGKAPKLLIYAASILQSG | ADI-41415 | Light chain variable region |
| | | VPSRFSGSGSGTDFTLTITSLQPEDFAIYYCQQSYTTPKYTFGQGTKVEIK | | (“LC”) amino acid sequence |
| Ab 704 | 1407 | EVQLVESGGGLVKPGGSLRLSCAASGFKFSSYTMNWVRQAPGKGLEWVSSITGGS | ADI-41416 | Heavy chain variable region |
| | | SFINYADSVKGRFTISRDNAKNSLYLQMVSLRAEDTAVYYCARDLSSHITIFGAVSDY | | (“HC”) amino acid sequence |
| | | WGRGTTVTVSS | | |
| Ab 704 | 1408 | QSVLTQPPSVSGAPGQRVTISCTGSSSNIGAGYDAHWFQQLPGSAPKLLIYANTNR | ADI-41416 | Light chain variable region |
| | | PSGVPDRFSGSKSGTSASLAITGLQAEDEADYYCQSYDSTLSVVFGGGTKLTVL | | (“LC”) amino acid sequence |
| Ab 705 | 1409 | QVQLVESGGGLVKPGGSLRLSCAASGFTFSSYSMNWVRQAPGKGLEWVSSISAGS | ADI-41417 | Heavy chain variable region |
| | | SYIYYADSLKGRFTISRDNAKNSLYLQMNSLRAEDTAVYYCARVNTHYYDSSAYHNF | | (“HC”) amino acid sequence |
| | | DSWGQGTLVTVSS | | |
| Ab 705 | 1410 | QPVVTQPPSVSGAPGQRVTISCTGSSSNIGAGYDVHWYQQLPGTAPKLLIYGNTNR | ADI-41417 | Light chain variable region |
| | | PSGVPERFSGSKSGTSASLAITGLQAEDEADYYCQSYDTNLSAPWVFGGGTKLTVL | | (“LC”) amino acid sequence |
| Ab 706 | 1411 | EVQLVESGGGLVKPGGSLRLSCAASGLSFTDAWMGWVRQAPGKGLEWVGHIKKK | ADI-41418 | Heavy chain variable region |
| | | TDYGPTAYAAPVRGRFTVSRDDSKNTLYLQMTSLKTEDTAVYYCITERGYNFGYND | | (“HC”) amino acid sequence |
| | | YFGVDVWGQGTLVTVSS | | |
| Ab 706 | 1412 | QPGLTQPPSVSVSPGQTARITCSGDALPKKYAYWYQQKSGQAPVMIIYEDNKRPSG | ADI-41418 | Light chain variable region |
| | | IPERFSGSTSGTMATLTISGAQMEDEADYYCFSTDSGDDQSGVFGGGTRLTVL | | (“LC”) amino acid sequence |
| Ab 707 | 1413 | EVQLVESGGGLVQPGRSLRLSCAASGFTFDDYAMHWVRQAPGKGLEWVSGISW | ADI-41419 | Heavy chain variable region |
| | | NSGSVGYSDSVKGRFTISRDNAKSSLYLQMNNLRAEDTALYYCARDMAHTQDYFD | | (“HC”) amino acid sequence |
| | | TSEYDSWGQGTLVTVSS | | |
| Ab 707 | 1414 | QPVLTQPASVSGSPGQSITISCTGTSSDIGAYNYVSWYQQHPGKAPKLVVYEVNNR | ADI-41419 | Light chain variable region |
| | | PSGISNRFSGSKSGNTASLTISGLQAEDEADYYCSSYTVSATLVFGGGTKLTVL | | (“LC”) amino acid sequence |
| Ab 708 | 1415 | EVQLLESGGGVVQPGRSLRLSCAASGFTFSSYAMHWVRQAPGKGLEWVAVISYDG | ADI-41420 | Heavy chain variable region |
| | | SNKYYADSVKGRFTISRDNSKNTLYLQMNSLRAEDTAVYYCARVPCSSTSCYTTDY | | (“HC”) amino acid sequence |
| | | WGQGTLVTVSS | | |
| Ab 708 | 1416 | QPVLTQPPSVSGSPGQSVTISCTGTSSDVGSYNRVSWYQQPPGTAPKLMIYEVSNR | ADI-41420 | Light chain variable region |
| | | PSGVPDRFSGSKSGNTASLTISGLQAEDEADYYCSSYTSSSPVFGGGTKVTVL | | (“LC”) amino acid sequence |
| Ab 709 | 1417 | QVQLVESAAEVKRPGASLKVSCKASGYTFIDYDISWVRQAPGQGLDWMGWISTY | ADI-41421 | Heavy chain variable region |
| | | DGSAKYPENLQARVAMTTDTSTSTAYMELESLTSDDTAVYYCARARRGSSGWVST | | (“HC”) amino acid sequence |
| | | TGPTPFFDYWGRGTLVTVSS | | |
| Ab 709 | 1418 | SYELTQPPSVSVSPGQTARITCSGDALPKRYAYWYQQKSGQAPVLVIYEDNKRPSGI | ADI-41421 | Light chain variable region |
| | | PERFSGSSSGTVATLTISGAQVEDEADYSCYSTDATGNHRGLFGGGTKLTVL | | (“LC”) amino acid sequence |
| Ab 710 | 1419 | QVQLVESGGGLVKPGGSLRLSCAASGFTFSSYSMNWVRQAPGKGLEWVSSISSSSS | ADI-41423 | Heavy chain variable region |
| | | YIYYADSVKGRFTISRDNAKNSLYLQMNSLRAEDTAVYYCARDPSSSWNRNDYWG | | (“HC”) amino acid sequence |
| | | QGTLVTVSS | | |
| Ab 710 | 1420 | QSVLIQPASVSGSPGQSITISCTGTSSDVGGYNYVSWYQQHPGKAPKLMIYDVSNR | ADI-41423 | Light chain variable region |
| | | PSGVSNRFSGSKSGNTASLTISGLQAEDEADYYCSSYTSSSTLVVFGGGTKVTVL | | (“LC”) amino acid sequence |
| Ab 711 | 1421 | QVQLVQSGAEVREPGASVKVSCKPSGYTFANYGISWVRQAPGQGLEWMAWISAY | ADI-41424 | Heavy chain variable region |
| | | NGNTNYAPKVQGRVSVTTDSSTGIGYMELRSLRSDDTAVYYCVRDTPAIAGAATLD | | (“HC”) amino acid sequence |
| | | FWGQGTLVTVSS | | |
| Ab 711 | 1422 | DIVLTQSPLSLAVTPGQSASISCRSRQSHVFSDGNTYVSWFQQRPGRSPRRLIYRVSY | ADI-41424 | Light chain variable region |
| | | RDSGVPDRFSGSGSGSDFTLRISRVEAEDVGVYYCMQGTHWPRTFGQGTKLEIK | | (“LC”) amino acid sequence |
| Ab 712 | 1423 | EVQLLESGPAVVKPTQTLTLTCTVSGLSLSSPRMSVSWIRQPPGKGLEWLARIDWD | ADI-41425 | Heavy chain variable region |
| | | GDKYYGTSLKTRLSISKDTSKNQVVLTMTNMDPVDTGTYYCAQTSIYASNAYYLARL | | (“HC”) amino acid sequence |
| | | DPWGQGMLVTVSS | | |
| Ab 712 | 1424 | EIVMTQSPSLLSASVGDRVTITCRASQNIATYLNWYQQKPGKAPRLLIYAASNLQSG | ADI-41425 | Light chain variable region |
| | | VPSGFSGSGSGTVFTLTISSLQPEDFATYFCQQSYETSLTFGGGTKVEIK | | (“LC”) amino acid sequence |
| Ab 713 | 1425 | QVQLVESGPGLVKPSETLSLTCTVSGGSIGGYYWSWIRQPPGKGLEWIGYMYYSGS | ADI-41427 | Heavy chain variable region |
| | | TNYNPSLKSRVIMSVDTSKNQFSLKLTSVTAADTAVYYCARVLRFLVGGMDVWGQ | | (“HC”) amino acid sequence |
| | | GTTVTVSS | | |
| Ab 713 | 1426 | QSVLIQPASVSGSPGQSITISCTGTSSDVGGYNYVSWYQQHPGKAPKLIIYEVSNRPS | ADI-41427 | Light chain variable region |
| | | GVSNRFSGSKSGNTASLTISGLQAEDEADYYCNSYTTIATLVFGTGTKVTVL | | (“LC”) amino acid sequence |
| Ab 714 | 1427 | QVQLVQSGAEVKKPGSSVKVSCKASGGTFSSYAISWVRQAPGQGLEWMGGIIPIF | ADI-41429 | Heavy chain variable region |
| | | GTVNYAQKFPGRVTITADESTSTAYMELSSLRSEDTAIYYCARDSPSYTGSLLFSQYYY | | (“HC”) amino acid sequence |
| | | GMDVWGQGTTVTVSS | | |
| Ab 714 | 1428 | QPVLTQPASVSGSPGQSITISCTGTSSDVGGYDYVSWYQHHPGKAPKLMIYEVSNR | ADI-41429 | Light chain variable region |
| | | PSGVSNRFSGSKSGNTASLTISGLQAEDEADYYCSSFTTSSPRVFGTGTKLTVL | | (“LC”) amino acid sequence |
| Ab 715 | 1429 | QVQLVQSGAEVKKPGASVRVSCTASGYRFFTYGITWVRQAPGQGLEWMGWISAY | ADI-41431 | Heavy chain variable region |
| | | NGNTKFAQKFQGRLTMTTDAPTSTADMELRGLRSDDTAVYYCAREEGGYHGTGS | | (“HC”) amino acid sequence |
| | | NNYWGQGTLVTVSS | | |
| Ab 715 | 1430 | QSVLTQPPSVSAAPGQKVTISCSGSGSNVGGNDVSWYQQFPGTAPKLLIYDNSKRP | ADI-41431 | Light chain variable region |
| | | SGIPDRFSGSKSGTSATLVITGLQTGDEADYYCGTWDSSLSVGVFGTGTKLTVL | | (“LC”) amino acid sequence |
| Ab 716 | 1431 | QVQLVQSGAEVKKPGYSVKVSCKASGGTFSTFGISWVRQAPGLGLEWMGGIIPLF | ADI-41432 | Heavy chain variable region |
| | | GTADYSKKYQGRVTITADESTSTGYMELNSLTPEDTAVYYCARSPGHLWSRYDAFE | | (“HC”) amino acid sequence |
| | | VWGQGTTVTVSS | | |
| Ab 716 | 1432 | QPVLTQPRSVSGSPGQSVTISCSGTSSDVGGYNYVSWYQQYPGKAPKLIIYDVNKR | ADI-41432 | Light chain variable region |
| | | PSGVPDRFSGSKSDNTASLTISGLQADDESDYFCCSYAGSHTFEVFGTGTKVTVL | | (“LC”) amino acid sequence |
| Ab 717 | 1433 | EVQLLESGGGAVQPGRFLRLSCAASGFTFRSYGMHWVRQAPGKGLEWVAVISYD | ADI-41433 | Heavy chain variable region |
| | | GSDKYYADSVKGRFTISRDNSKNTLFLLMNGLRAEDAAVYYCAKDIASAGTLRGSDV | | (“HC”) amino acid sequence |
| | | WGQGTMVTVSS | | |
| Ab 717 | 1434 | QPVLTQPRSVSGSPGQSVTISCTGTSSDVGGFNYVSWYQQHPGKAPKLMIYDVRV | ADI-41433 | Light chain variable region |
| | | RPSGVPDRFSGSKSGNTASLTISGLQGEDEADYYCCSYTVTYTLVFGGGTKLTVL | | (“LC”) amino acid sequence |
| Ab 718 | 1435 | EVQLVESGGGLVQPGRSLRLSCEASGFTFDDYAMHWVRQTPGKGLEWVSGISWN | ADI-41434 | Heavy chain variable region |
| | | SGSIVYADSVKGRFTISRDNAKNSLYLQMHSLRPEDTALYYCAKDNYTFGNYYYYYG | | (“HC”) amino acid sequence |
| | | MDVWGQGTTVTVSS | | |
| Ab 718 | 1436 | EIVLTQSPVTLSVSPGERATLSCRASQNVISNLAWYQQKPGQAPRLLIYGASTRATGI | ADI-41434 | Light chain variable region |
| | | PARFSGSGSGTEFTLTISSLQSEDFAVYYCQQYNNWPLSFGGGTKVEIK | | (“LC”) amino acid sequence |
| Ab 719 | 1437 | EVQLLESGGGLVKPGGSLRLSCAASGFTFSSYSLNWVRQAPGKGLEWVSSISSSGTY | ADI-41435 | Heavy chain variable region |
| | | IFYADSVKGRFTISRDNAKDSLFLQMNSLRAEDTAVYYCARARDMGNYDILTGYYR | | (“HC”) amino acid sequence |
| | | VDAFDIWGQGTMVTVSS | | |
| Ab 719 | 1438 | QSVLTQPPSASKTPGQRVTISCSGSSSNIGGNTVNWYQQLPGTAPKLLIYTNDQRPS | ADI-41435 | Light chain variable region |
| | | GVPDRFSGSKSGTSASLAISGLQSEDEADYYCAAWDDSLNGWVFGGGTKLTVL | | (“LC”) amino acid sequence |
| Ab 720 | 1439 | EVQLLESGGGVVQPGRSLRLSCAASGFTFSDYAMHWVRQAPGKGLEWVALISFDG | ADI-41436 | Heavy chain variable region |
| | | SNEYYADSVKGRFTISRDNSRNTVYLQVNTLRPDDTAVFYCARDSHLRLTTRGWGS | | (“HC”) amino acid sequence |
| | | FDYWGQGTLVTVSS | | |
| Ab 720 | 1440 | NFMLTQPHSVSESPGKTVTIACTRSSGSIARNYVQWYQQRPGRSPTMVIYEDNQR | ADI-41436 | Light chain variable region |
| | | PSGVPDRFSGSIDTSSNSASLTISGLKTEDEADYYCQPYDPDNLVFGGGTKLTVL | | (“LC”) amino acid sequence |
| Ab 721 | 1441 | QVQLVQSGGEVKKPGASVKVSCKASGYTFTHYGISWARQAPGQGIEWMGWINV | ADI-41437 | Heavy chain variable region |
| | | HNGNTEYAQRFQGRVTMTTDTSTNTAYMEMTSLTSDDTAVYYCARDKIVVVVVP | | (“HC”) amino acid sequence |
| | | NYHGMDVWGQGTLVTVSS | | |
| Ab 721 | 1442 | EIVLTQSPDSLAVSLGERATINCKSSQSVLYRANNRNYLAWYQQKPGQPPKLLIYWA | ADI-41437 | Light chain variable region |
| | | STRESGVPDRFSGSGSGTDFTLTISSLQAEDVALYYCHQYHSSPRTFGQGTKVDIK | | (“LC”) amino acid sequence |
| Ab 722 | 1443 | QVQLVQSGAEMRRPGSSVRLPCKASGYTFVSHTIVWVRQAPGQGLEWMGGIIPS | ADI-41438 | Heavy chain variable region |
| | | LRTPNYAQNFQDRLTITADESARTAYMELSSLTSNDTAVYYCARETFQGGYYLDYW | | (“HC”) amino acid sequence |
| | | GQGTLVTVSS | | |
| Ab 722 | 1444 | EIVMTQSPGTLSVSPGDTAALSCRASQSVGRNLAWYQQKPGQAPRLLIFGASTRAA | ADI-41438 | Light chain variable region |
| | | DIPGRFSGSGSGTEFTLTITSLQSEDFAVYYCQQYNKWPPYTFGQGTKVEIK | | (“LC”) amino acid sequence |
| Ab 723 | 1445 | QVQLVQSGTEVKNPGASVKVSCKASGYTFSNYGITWVRQAPGQGLEWMAWISAY | ADI-41439 | Heavy chain variable region |
| | | NGNILYAQNVQGRVTMTTDTSTSTGYMELRSLRSDDTAVYYCARDAPAGTLILLDY | | (“HC”) amino acid sequence |
| | | WGQGTLVTVSS | | |
| Ab 723 | 1446 | DIVMTQTPLSLPVTLGQPASISCRPSQSLVYSDGNTYLNWFQQRPGQSPRRLIYKVS | ADI-41439 | Light chain variable region |
| | | NRDSGVPDRFSGSGSGTDFTLRISRVEAEDVGVYYCMQGSHWPYAFGQGTKVEIK | | (“LC”) amino acid sequence |
| Ab 724 | 1447 | EVQLVESGGGLVKPGGSLRLSCAVSGFTFSDYTMNWVRQAPGKGLEWVSSISGSG | ADI-41440 | Heavy chain variable region |
| | | TYIYYGDSVKGQFTISRDNAKNSLYLQMNSLRAEDTAVYYCARELPAKTIFGVDFLG | | (“HC”) amino acid sequence |
| | | GTTAYDCWGQGTPVTVSS | | |
| Ab 724 | 1448 | EIVLTQSPATLSVSPGERATLSCRASQSVSSNLAWYQQKPGQAPRLLIYSATTRATG | ADI-41440 | Light chain variable region |
| | | VPARFSGSGSGTEFTLTISSLRSEDFAVYYCQQYNNGGTFGPGTKVEIK | | (“LC”) amino acid sequence |
| Ab 725 | 1449 | EVQLVQSGPGLVKPSETLSLICSVSGASISRYHYYWGWIRQSPGKGLEWIGTIYYSG | ADI-41441 | Heavy chain variable region |
| | | TTYYNPSLESRVTISADTSKNQVSLKLTSVTAADTAVYYCARGSGDTALDFSFEYWG | | (“HC”) amino acid sequence |
| | | QGALVTVSS | | |
| Ab 725 | 1450 | DIQLTQSPSFLSASVGDRITITCRASQGISNSLAWYQQKPGKAPKLLIYAASTLQFAV | ADI-41441 | Light chain variable region |
| | | PSRFSGSGSGTEFTLTISSLQPEDFATYYCQQLDSYPLTFGGGTKLEIK | | (“LC”) amino acid sequence |
| Ab 726 | 1451 | EVQLLESGGGLVQPGRSLRLSCAASGFTFDDYAMHWVRQAPGKGLEWVSGISWH | ADI-41442 | Heavy chain variable region |
| | | SGSIVYADSVKGRFTISRDNAKNSLYLQMSSLRAEDTALYYCVKDHYNWNDNPHFH | | (“HC”) amino acid sequence |
| | | YGLDVWGQGTTVTVSS | | |
| Ab 726 | 1452 | EIVLTQSPATLSVSPGERATLSCRASQSVISNLAWYQQKPGQAPRLFIYGASTRATGI | ADI-41442 | Light chain variable region |
| | | PARFSGSGSGTEFTLTISSLQSEDFAVYFCQQYNNWPITFGQGTRLEIK | | (“LC”) amino acid sequence |
| Ab 727 | 1453 | EVQLVESGGGVVQPGKSLRLSCAASGFTFSSYAMHWVRQAPGKGLEWVSVIWYE | ADI-41443 | Heavy chain variable region |
| | | DSDKYYGDSVKGRFTISRDNSKNTLYLQMNSLRAEDTAVYYCARKSGGFGGLDYW | | (“HC”) amino acid sequence |
| | | GQGTLVTVSS | | |
| Ab 727 | 1454 | DIVMTQSPLSLPVTPGEPASISCKSSQSLLTANGYNYLDWYVQKPGQSPHVLISLGS | ADI-41443 | Light chain variable region |
| | | NRASGVPDRFSGSGSGTDFTLKISRVEAEDVGVYYCMQAIETPITFGQGTRLEIK | | (“LC”) amino acid sequence |
| Ab 728 | 1455 | EVQLVESGPRLVKPSQTLSLTCTVSGGSIGTGDYHWTWIRQSPGKGLEWIGNIYYN | ADI-41444 | Heavy chain variable region |
| | | GRTFYNPSLKGRGSISRDASKNQFSLNLSSVSAADTAVYYCARDRAAKGFDHWGQ | | (“HC”) amino acid sequence |
| | | GTLVTVSS | | |
| Ab 728 | 1456 | DIQLTQSPSTLSASVGDRVTITCRASQNINGWLAWYQQKPGRVPKLLIYKASTLESG | ADI-41444 | Light chain variable region |
| | | VPSRFSGSASGTEFTLTINNLLPDDFATYYCQQYNDYPYTFGQGTKVEIK | | (“LC”) amino acid sequence |
| Ab 729 | 1457 | QVQLVQSGAEVKRPGSSVKVSCKAFGGSFSNYAINWVRQAPGQGLEWMGGISPV | ADI-41445 | Heavy chain variable region |
| | | LGTAIYAKRFQGKVTITADKFANTAYMDLSSLRFEDTAVYYCARSPPHVEFPLTKWF | | (“HC”) amino acid sequence |
| | | DPWGQGTLVTVSS | | |
| Ab 729 | 1458 | EIVMTQSPGTLSLSPGERATLSCRASQSVNSGYLAWYQHKPGRAPRLLIYGASNRAT | ADI-41445 | Light chain variable region |
| | | GVPDRFSGSGSGTDFTLTISRLEPEDFAVYYCQQYDNSLFTFGPGTKVDIK | | (“LC”) amino acid sequence |
| Ab 730 | 1459 | EVQLLESGGGLVQPGGSLRLSCAASGFTYYSYAMNWVRQAPGKGLEWVSAISGG | ADI-41446 | Heavy chain variable region |
| | | GDNTFYAESVKGRFTISRDNAKNTLYLQMDSLRAEDTAVYYCAKDLQGYTSLYCFDY | | (“HC”) amino acid sequence |
| | | WGQGTLVTVSS | | |
| Ab 730 | 1460 | EIVMTQSPATLSLSPGERAALSCRASQSVFNYVAWYQQKPGQAPRLLIYDTSKRAT | ADI-41446 | Light chain variable region |
| | | GIPARFSGSGSGTDFTLTISSLEPEDFAVYYCQHRYNWPGLIFGGGTKVEIK | | (“LC”) amino acid sequence |
| Ab 731 | 1461 | EVQLLESGGGLVQPGGSLRLSCAASGFTFSTYAMNWVRQAPGKGLEWVSTISGSG | ADI-41447 | Heavy chain variable region |
| | | GSTYYGDSVKGRFTISRDNSKNTLYLQMNSLRAEDTAVYYCAKAPTPWCSGGSCYV | | (“HC”) amino acid sequence |
| | | SYWGQGTLVTVSS | | |
| Ab 731 | 1462 | DIVMTQTPGTLSLSPGERGTLSCRASQSVSSSYLAWYQQKPGQAPRLLIYGASSRAT | ADI-41447 | Light chain variable region |
| | | GIPDRFGGSGSGTDFTLTISTLEPEDFAVYYCQQYQSSPWTFGQGTKLEIK | | (“LC”) amino acid sequence |
| Ab 732 | 1463 | TVQLVESGAEVKSPGSSVRVSCQASGGSSNSYAISWVRQAPGQGLEWMGMISPLF | ADI-41448 | Heavy chain variable region |
| | | GTTRFSQRFQGRVTITADKSTSTAYMELSSLNSEDTALYYCARGRFDFWSGPTRFYY | | (“HC”) amino acid sequence |
| | | TMDVWGQGTMVTVSS | | |
| Ab 732 | 1464 | QSVLIQPASVSGSPGQSITISCSGTSSDIGGYNYVSWYQQHPGKAPKLLISDVTDRPS | ADI-41448 | Light chain variable region |
| | | GISDRFSGSKSGTSASLTISGLQADDEADYYCTSYTTSSTWVFGGGTKLTVL | | (“LC”) amino acid sequence |
| Ab 733 | 1465 | EVQLVESGGGLVKPGGSLRLSCAASGFSFSSYRVNWVRQAPGKGLEWVSSITGGSS | ADI-41449 | Heavy chain variable region |
| | | FIDYADSVKGRFTISRDNAKNSLFLQMNSLRAEDTAVYFCARDSMTTVTNSLAFDI | | (“HC”) amino acid sequence |
| | | WGQGTMVTVSS | | |
| Ab 733 | 1466 | QSVLTQPPSVSGAPGQRVTISCTGSSSNIGVGYDVQWYQQLPGTAPKLLIYSNNKR | ADI-41449 | Light chain variable region |
| | | PSGVPDRFSGSKSGTSASLAITGLQAEDEADYYCQSYDRSLSVVFGGGTKVTVL | | (“LC”) amino acid sequence |
| Ab 734 | 1467 | EVQLVESGGGLVKPGGSLRLSCAASGFAFSSYGINWVRQVPGKRLEWVSSISGGSS | ADI-41450 | Heavy chain variable region |
| | | FINYADSVKGRFTISRDNAGNSVYLQMNSLRAEDTAVYFCARESYGSGSSLNWFDP | | (“HC”) amino acid sequence |
| | | WGQGTLVTVSS | | |
| Ab 734 | 1468 | QSVLTQPPSVSGAPGQRVTISCTGSGSNIGAGYDVHWYQQLPGIAPRLVIFGNRNR | ADI-41450 | Light chain variable region |
| | | PSGVPDRISGSKSDTSASLAITGLQAEDEGDYYCQSYDKRLSGWVFGGGTKLTVL | | (“LC”) amino acid sequence |
| Ab 735 | 1469 | EVQLVESGGGLVQPGGSLRLSCAAAGFTFNNYEMHWVRQAPGKGLEWVSCVTSS | ADI-41451 | Heavy chain variable region |
| | | GTATYYADSVKGRFTVSRDNAKKSLQLQMNSLRAEDTAVYYCARELYLGEDYYYGL | | (“HC”) amino acid sequence |
| | | DVWGQGTTVTVSS | | |
| Ab 735 | 1470 | SYELTQPPSVSVSPGQTASISCSGDKLRNKHTCWYQHKSGQSPVLLIYQDNRRPSGI | ADI-41451 | Light chain variable region |
| | | PDRLSGSKSGTTATLTISWTQAMDEAEYYCQAWDSNSAVIFGGGTKLTVL | | (“LC”) amino acid sequence |
| Ab 736 | 1471 | QVQLVQSGAELKKPGASVKVSCKASGHTFATYAIHWVRQAPGQSLEWLGWINTA | ADI-41452 | Heavy chain variable region |
| | | NGDTKYSQKFRATVTIHGDTSANTVYLELSRLRSEDTAVYYCASPPLVGAINLEFWG | | (“HC”) amino acid sequence |
| | | PGILVTVSS | | |
| Ab 736 | 1472 | QSVLTQPASVSGSVGQSITISCTGTSSDVGGYNSVSWYQHHPDKAPKLIIYEVSNRP | ADI-41452 | Light chain variable region |
| | | SGVSHRFSGSKSGNTASLTISGLQAEDEADYYCSSYTTSDTLIFGGGTKVTVL | | (“LC”) amino acid sequence |
| Ab 737 | 1473 | QVQLVQSGAEVRKPGASVKVSCKASGYTFSIYDMNWVRQAPGQGLEWMGWM | ADI-41453 | Heavy chain variable region |
| | | NPNSGNTGYAQKFQGRVTMTGDTSISTAYMELSSLTSEDTAVYYCAVMYGDYPGY | | (“HC”) amino acid sequence |
| | | WGQGSLVTVSS | | |
| Ab 737 | 1474 | SYELTQPLSVSVALGQTARITCGGNNIGSKSVHWYQQKPGQAPVLVIYRDAKRPSGI | ADI-41453 | Light chain variable region |
| | | PERFSGSNSGNTATLTISGAQAGDEADYYCQVWDSNAWIFGGRTKLTVL | | (“LC”) amino acid sequence |
| Ab 738 | 1475 | QVQLVQSGAEVKKPGASVKVSCKASGYTFTHFGISWVRQAPGQGLEWMGWISIY | ADI-41454 | Heavy chain variable region |
| | | NGNTNYAQKIQGRATMTTDASTSTAYMELRSLTSDDTAVYYCAREPPSTTAAATSD | | (“HC”) amino acid sequence |
| | | YWGQGTLVTVSS | | |
| Ab 738 | 1476 | DIVMTQSPLSLPVTLGQPASISCRSSQSLVYIEGNTYLSWFQQRPGQSPRRLIYKVSN | ADI-41454 | Light chain variable region |
| | | RDSGVPDRFSGSGSGTDFTLKISRVEAEDVGLYYCMQGTHWPRTFGQGTKLEIK | | (“LC”) amino acid sequence |
| Ab 739 | 1477 | QVQLQESGPGLVKPSQTLSLTCSVSEGSVISGDYYWSWIRQSPGKGLEWLGYIHYS | ADI-41455 | Heavy chain variable region |
| | | GSTYYNPSLKSRVTISVDTSKKQFSLKLSSVTAADTAVYYCARDLGCIGGVCSAYGLE | | (“HC”) amino acid sequence |
| | | HNYYFGMDVWGQGTTVTVSS | | |
| Ab 739 | 1478 | EIVLTQSPATLSLSPGERATLSCRASQSVSSYLAWYQQKPGQAPRLLIYTASNRATGI | ADI-41455 | Light chain variable region |
| | | PARFSGSGSGTDFTLTISSLEPEDFAVYYCQQRSSWPPYTFGQGTKLEIK | | (“LC”) amino acid sequence |
| Ab 740 | 1479 | EVQLLESGGGLFHPGGSLTLSCVASGFTLSTYYMHWVRQAPGKGLVWVARINSDG | ADI-41456 | Heavy chain variable region |
| | | GYTTYADSVKGRFTVSRDNAKNTLYLQMNSLRVEDTAVYYCAREWVEFDSWGQG | | (“HC”) amino acid sequence |
| | | TLVTVSS | | |
| Ab 740 | 1480 | NFMLTQPHSVSASPGKTVTISCTRSSGNIASNYVQWYQQRPGSSPTTVITEDNQRP | ADI-41456 | Light chain variable region |
| | | SGVPDRFSGSIDSSSNSASLTISGLKTEDEADYYCQSYDSSTYVFGTGTKLTVL | | (“LC”) amino acid sequence |
| Ab 741 | 1481 | EVQLVESGGGLVRPGGSLRVSCAASGFTFIRYDMHWVRQAPGKGLEWVSGIGTA | ADI-41457 | Heavy chain variable region |
| | | GDTYYAASVQGRFTISRENAKNSLYLQMSNLRPGDTAVYYCAGSMAATGIDQWG | | (“HC”) amino acid sequence |
| | | QGTLVTVSS | | |
| Ab 741 | 1482 | EIVMTQSPLTLPVTPGEPASISCRSSQSLLHSNGFTYLDWFLQKPGQSPQLLIFLGSN | ADI-41457 | Light chain variable region |
| | | RASGVPDRFSGSGSGTDFTLKISRVEAEDVGIYYCMQALQTPYTFGQGTKVEIK | | (“LC”) amino acid sequence |
| Ab 742 | 1483 | EVQLLESGSGLVKPSQTLSLTCAVSGDSLNSALYSWSWIRQPPGKGLEWIGYIYYSG | ADI-41458 | Heavy chain variable region |
| | | STYYNSSLKSRVTISIDRSKNQFSLNLNSVTAADTAVYYCASLQTGYSSGWFFDFWG | | (“HC”) amino acid sequence |
| | | PGILVTVSS | | |
| Ab 742 | 1484 | EIVLTQSPGTLSLSPGERATLSCRASQSVSRTYLTWYQQKPGQAPRLLIYGASNRATG | ADI-41458 | Light chain variable region |
| | | IPDRFSGSGSGTDFTLTISRLEPEDFAVYYCQQYGSTPLFGQGTKVEIK | | (“LC”) amino acid sequence |
| Ab 743 | 1485 | QVQLVESGGGLVQPGGSLRLSCAASGFPFSAYGINWVRQAPGKGLEWVSYISSTST | ADI-41459 | Heavy chain variable region |
| | | TIKYADSVKGRFTISRDDAKNSLYLQLRSLRPEDTAVYYCAGGVWSGYYIDFWGQG | | (“HC”) amino acid sequence |
| | | TPVTVSS | | |
| Ab 743 | 1486 | NFMLTQPQSVSESPGKTVTISCTRSSGSIGSNFVQWYQQRPGSSPTTVIYEDYQRPS | ADI-41459 | Light chain variable region |
| | | GVPDRFSGSIDSSSNSASLTISGLKTEDEADYYCQSYDADMMVFGGGTKLTVL | | (“LC”) amino acid sequence |
| Ab 744 | 1487 | QVTLKESGPALVKPTQTLTLICTFSGFSLNTRGMCVSWVRQPPGKALEWLARIDW | ADI-41460 | Heavy chain variable region |
| | | DDDKNYSTSLRTRLTISKDTSRNQVVLAMANMDPVDTATYYCARCARYDRSGYYV | | (“HC”) amino acid sequence |
| | | WYLDSWGQGTLVTVSS | | |
| Ab 744 | 1488 | DIQMTQSPSSLSASVGDRVTITCRASQTIASYLNWYQQKPGKAPKLLIYVASTLQSG | ADI-41460 | Light chain variable region |
| | | VPSRFSGSGSGTDFTLTISSLQPEDFATYYCQQSYSLTQWTFGQGTKVEIK | | (“LC”) amino acid sequence |
| Ab 745 | 1489 | QVQLVQSGAEVKKPGASVKVSCRASGYTFSSYDINWVRQATGQGLEWMGWMS | ADI-41461 | Heavy chain variable region |
| | | PNSANTGYAQKFQGRVIMIRDTSINTAYMELSSLSSEDTAVYYCARFLGYCSGGSC | | (“HC”) amino acid sequence |
| | | YPGYGMDVWGQGTTVTVSS | | |
| Ab 745 | 1490 | EIVLTQSPDSLAVSLGERATINCKSSQNVLYSSNNKDYLSWYQQKPGQPPKLLIYWA | ADI-41461 | Light chain variable region |
| | | STRESGVPDRFSGSGSGTDFTLTINSLQAEDVAVYYCQQYYGTPYTFGQGTKLEIK | | (“LC”) amino acid sequence |
| Ab 746 | 1491 | QVQLQQWGAGLVKPSETLSLSCDVYGGSFSGYYWTWIRQPPGKGLEWIGEINHS | ADI-41462 | Heavy chain variable region |
| | | GRTNYNPSLKNRVTISVDTSKKQFSLKLSSVTAADTAVYFCARAPYYDIVTDYNITTA | | (“HC”) amino acid sequence |
| | | YFYGMDVWGQGTTVTVSS | | |
| Ab 746 | 1492 | DIQMTQSPDSLAVSLGERATINCRSSQSVLYSSNNKNYLTWYQQKPGQPPKLLIYW | ADI-41462 | Light chain variable region |
| | | ASTRESEVPDRFSGSGSGTDFSLTISSLQAEDVAVYYCQQYYNTPLTFGGGTKVEIK | | (“LC”) amino acid sequence |
| Ab 747 | 1493 | QVQLVQSGAEVKKPGASVKVSCTASGYSFTDYDISWVRQAPGQGLEWMGWISAY | ADI-41463 | Heavy chain variable region |
| | | NGNTNYAQKFQDRVTMNTDTSTNTAYMELRGLRSDDTAVYYCARNCYYGSGTCYI | | (“HC”) amino acid sequence |
| | | EDYYFDYWGQGTLVTVSS | | |
| Ab 747 | 1494 | DIQMTQSPSSLSASVGDRVTITCRASQDIKNDLGWYQQKPGKPPKRLIYGASRSQS | ADI-41463 | Light chain variable region |
| | | GVPSRFSGSGSGTDFTLTIYSLQPEDFATYYCLQHSDYPFTFGQGTRLEIK | | (“LC”) amino acid sequence |
| Ab 748 | 1495 | QVQLVESGPGLVRPSGTLSLICTVSGDSVNSYRWSWIRQSPGKGLEWIGYISYSGET | ADI-41464 | Heavy chain variable region |
| | | NYNPSLKSRVSISVGTSRYQFFLKLSSVTAADTATYYCARDKTTIFGVSHYYFGVDVW | | (“HC”) amino acid sequence |
| | | GQGTTVTVSS | | |
| Ab 748 | 1496 | DIVMTQTPLSLPVTPGEPASISCRSSQSLLKSDGYNSLDWYLQRPGQSPQLLIYLGSN | ADI-41464 | Light chain variable region |
| | | RASGVPARFSGSGSGTDFTLKISRVEAEDVGVYYCMQALQTPFTFGPGTKVEIK | | (“LC”) amino acid sequence |
| Ab 749 | 1497 | QVQLVQSGGGVVQPGRSLRLSCAASGFTFTSYDMHWVRQAPGKGLEWVAIISHD | ADI-41465 | Heavy chain variable region |
| | | GSKQFYADSVKGRFTISRDNSKNTLYLQMNSLRPEDTAMYYCAKDTPSWGLLAEFF | | (“HC”) amino acid sequence |
| | | RHWGQGTLVTVSS | | |
| Ab 749 | 1498 | EIVLTQSPDSLAVSLGERATINCKSSQSVLYSSNDKDYLAWYQHKPGQPPKLLIYWA | ADI-41465 | Light chain variable region |
| | | STRESGVPDRFSGSGSGTDFTLTISSLQAEDVAVYYCQQYYGTPYTFGQGTKVEIK | | (“LC”) amino acid sequence |
| Ab 750 | 1499 | QVQLVQSGAEVKKPGASVKVSCKASGYTFNFYYMHWVRQAPGQGLEWMGWIN | ADI-41466 | Heavy chain variable region |
| | | PKSGGTSYAQKFQGRVIMTGDTSISTTYMELSRLRSDDTAVYYCARADTGLELDVW | | (“HC”) amino acid sequence |
| | | GQGTTVTVSS | | |
| Ab 750 | 1500 | QSALIQPASVSGSPGQSITISCTGTSSDVGGYNYVSWYQQHPGKAPKLILYDVSKRP | ADI-41466 | Light chain variable region |
| | | SGVSNRFSGSKSGNTASLTISGLQAEDESDYFCSSYTRSNTVVFGGGTKVTVL | | (“LC”) amino acid sequence |
| Ab 751 | 1501 | EVQLVESGGGLVKPGGSLRLSCAASGFSFSSYNMNWVRQAPGKGLEWVSSISGGS | ADI-41467 | Heavy chain variable region |
| | | SFVNYADSVKGRFTISRDNAKNSLYLQMSSLKAEDTAIYYCARDPVYCSAASCSAYF | | (“HC”) amino acid sequence |
| | | DSWGQGSLVTVSS | | |
| Ab 751 | 1502 | QSVLTQPPSVSGAPGQRVTISCTGSSSNIGAGYDVHWYQQLPGTAPKLLIYGNNNR | ADI-41467 | Light chain variable region |
| | | PSGVPDRFSGFKSGSSASLAITGLQAEDEADYYCQSYDIGLSDSHVVFGGGTQLTVL | | (“LC”) amino acid sequence |
| Ab 752 | 1503 | QVQLQQWGAGPLKSSETLSLTCEVYGGPFSGYSWSWIRQPPGKGLEWIGEINHSG | ADI-41468 | Heavy chain variable region |
| | | STNYNPSLKSRVSFSVDTSKNQFSLKLSSVTAADTAVYYCARGAGFCTSTSCPPGLYY | | (“HC”) amino acid sequence |
| | | YYGMDVWGHGTTVTVSS | | |
| Ab 752 | 1504 | SYELTQPLSVSVALGQTARITCGGNNIESKNVHWYQQMPGLAPVMVIYRDTNRPS | ADI-41468 | Light chain variable region |
| | | GIPERFSGSNSGNTATLTISRAQAGDEADYYCQVWDSGTVIFGGGTKLTVL | | (“LC”) amino acid sequence |
| Ab 753 | 1505 | EVQLVESGGGVVQPGRSLRLSCAASGFTFSSYGMHWVRQAPGKGLEWVAVISYD | ADI-41469 | Heavy chain variable region |
| | | GSFIKYADSMMGRFTISRDNSKNTLYLQMSSLRPEDTATYYCAKDALIPEYWGQGT | | (“HC”) amino acid sequence |
| | | LVTVSS | | |
| Ab 753 | 1506 | QPVLTQPASVSGSPGQSITISCTGTSSDVGGYNYVSWYQKHPDKAPRVIIYEVSNRP | ADI-41469 | Light chain variable region |
| | | SGVSNRFSGSKSGNTASLTISGLQAEDEADYYCCSYTSTSGVVFGGGTKLTVL | | (“LC”) amino acid sequence |
| Ab 754 | 1507 | QVQLVQSGADVKKPGSSVKISCKASGGSFITNSLSWVRRAPGQGLEWMGGIIPVS | ADI-41471 | Heavy chain variable region |
| | | GTTTYAQKFLGRVTFTADESTSTAYMELNSLRSEDTAVYYCARFLGTPYPNVHYGM | | (“HC”) amino acid sequence |
| | | DVWGQGTTVTVSS | | |
| Ab 754 | 1508 | DIRVTQSPSSLSASVGARVTITCRASQSISTYLNWYQEKPGKAPKLLIYAASSLQRGV | ADI-41471 | Light chain variable region |
| | | PSRFSGSGSETTFTLTISSLQPEDFATYYCQQSYTAAYNFGQGTKVEIK | | (“LC”) amino acid sequence |
| Ab 755 | 1509 | QVQLVQSGAEVKKPGSSVKVSCKASGGTFSSYAISWVRQAPGQGLEWMGRIIPVL | ADI-41472 | Heavy chain variable region |
| | | DITNYAQKFQGRVTIMADKSTSTAYMELSSLRSEDTAIYYCARETSNFYFYYNAMDV | | (“HC”) amino acid sequence |
| | | WGQGTTVTVSS | | |
| Ab 755 | 1510 | QPVLTQPPSASGSPGQSVTISCTGTSSDVGGDNYVSWYQQHPGKAPKLLIYEVSKR | ADI-41472 | Light chain variable region |
| | | PSGVPDRFSGSRSGHTASLTVSGLQAEDEADYYCSSYAGRNNLGVFGGGTKLTVL | | (“LC”) amino acid sequence |
| Ab 756 | 1511 | QVQLVQSGPGLVKPSQTLSLTCAISGDSVSSNSAAWSWIRQSPSRGLEWLGRTYYR | ADI-41473 | Heavy chain variable region |
| | | SKWYYDHAVSVEGRITINADTSKNHFSLQLNSVTPEDTAVYYCARDPDSGNYFHYY | | (“HC”) amino acid sequence |
| | | GMDVWGQGTTVTVSS | | |
| Ab 756 | 1512 | ETTLTQSPATLSLSPGERATLSCRTSQSVSSYLAWYQQKPGQAPRLLIYDASRRATGI | ADI-41473 | Light chain variable region |
| | | PARFSGSGSGTHFTLTITSLEPEDFAVYYCQQRSKWPPYSFGQGTKVDIK | | (“LC”) amino acid sequence |
| Ab 757 | 1513 | QVQLVQSGAEVKRPGASVKVSCKISGYTFTSHYIHWLRQAPGQGLEWMGWINPN | ADI-41474 | Heavy chain variable region |
| | | TGDTKYEQKFQGRVTMTRDTSLSTAYMELRRLRSDDTAVYYCARDSFYAANGYYFV | | (“HC”) amino acid sequence |
| | | WFDPWGQGALVTVSS | | |
| Ab 757 | 1514 | DIQMTQSPTSLSASVGDRVTITCRASQSISSYLNWYQQKPGKAPRFLIYAASSLQSG | ADI-41474 | Light chain variable region |
| | | VPSRFRGSGSGTDFTLTISSLQPEDFATYYCQQSYSSPYTFGQGTKVEIK | | (“LC”) amino acid sequence |
| Ab 758 | 1515 | QVQLQESGPGLVKPSQTLSLTCAISGDSVSSNSAAWNWIRQSPSRGLEWLGRTYYR | ADI-41475 | Heavy chain variable region |
| | | SKWWTDYAVSVKSRITINPDTSKNQFSLQLNSVTPEDTAVYYCARDPDSGNYFHYY | | (“HC”) amino acid sequence |
| | | GMDVWGQGTTVTVSS | | |
| Ab 758 | 1516 | ETTLTQSPATLSLSPGERATLSCRASQSASSYLAWYQQKPGQAPRLLIYDASKRATGI | ADI-41475 | Light chain variable region |
| | | PARFSGSGSGTDFSLTISSLEPEDFAVYYCQLRSKWPPYTFGQGTKVEIK | | (“LC”) amino acid sequence |
| Ab 759 | 1517 | EVQLLESGGGLVQPGGSLRLSCATSGFRFTRYWMHWVRQAPGKGLEWVARINFD | ADI-41476 | Heavy chain variable region |
| | | GTTTNYADSVKGRFTVSRDNAKNTLYLQINSLRAEDTAVYFCARDQTFLEWLPFES | | (“HC”) amino acid sequence |
| | | WGQGTLVTVSS | | |
| Ab 759 | 1518 | QTVVTQEPSFSVSPGGIVTLICGLTSGSVSTSYYPSWYQQTPGQAPRTLIYNTKTRF | ADI-41476 | Light chain variable region |
| | | SGVPDRFSGSILGNKAALTITGAQADDESDYYCVLYMSGGMVFGGGTKLTVL | | (“LC”) amino acid sequence |
| Ab 760 | 1519 | QVQLVQSGAEVKKPGASVRVSCKASGYPFISYYIHWVRQAPGQGLEWMGMINTN | ADI-41477 | Heavy chain variable region |
| | | GGSTHYAQKFQGRVTMTRDTSTTTIYMELSRLKSEDTAYYFCARDNTETVLHGFWS | | (“HC”) amino acid sequence |
| | | GYGSYLDYWGQGTLVTVSS | | |
| Ab 760 | 1520 | EIVLTQSPGTLSLSPGGRATLSCRASQSVTSSYLAWYQQRPGQAPRLLIYGASSRAA | ADI-41477 | Light chain variable region |
| | | GIPDRFSGSGSGTDFTLTISRLEPEDFAVYYCQQYGSAPLTFGGGTKLEIK | | (“LC”) amino acid sequence |
| Ab 761 | 1521 | QVQLVQSGAEVKKPGESLKISCKGSGYSFISYWIGWVRQMPGKGLEWMGIIYPAD | ADI-41479 | Heavy chain variable region |
| | | SDTRYSPSFQGQVTISVDKSISTAYLQWSSLKASDTGMYYCVRYGVGGTAPRYWG | | (“HC”) amino acid sequence |
| | | QGTTVTVSS | | |
| Ab 761 | 1522 | NFMLTQPHSVSESPGKTVTISCTGSSGSIASNYVHWYQQRPGSAPTTVIYEDNQRP | ADI-41479 | Light chain variable region |
| | | SGVPDRFSGSIDSSSNSASLTISGLKTEDEADYYCQSYDISNLWVFGGGTKLTVL | | (“LC”) amino acid sequence |
| Ab 762 | 1523 | EVQLLESGPGLVRPSGTLSLTCTVSGDSISGSNWWAWVRQPPGRRLEWIGEIYYRG | ADI-41480 | Heavy chain variable region |
| | | ATDYNSSLKSRVIISVDNSKNQFSLNLRSVTAADTAIYYCARVEKFATSGYYISYFDYW | | (“HC”) amino acid sequence |
| | | GQGTLVTVSS | | |
| Ab 762 | 1524 | DIRVTQSPSSLSASVGDRVTITCRASQSISTYLNWYQHNPGKAPKLLIYAASSLQSGV | ADI-41480 | Light chain variable region |
| | | PSRFSGSGSGTHFTLTISSLQPADFSTYYCQQSYSSPWTFGQGTKVEIK | | (“LC”) amino acid sequence |
| Ab 763 | 1525 | QVQLVESGPGLVKPSETLSLACSVSGVSISTYYWTWIRQPPGKGLEWIGYISYSGST | ADI-41481 | Heavy chain variable region |
| | | NYNPSLKSRVTISADTSKNQFSLRLNSVTAADTAVYYCARTYYDFWSTYYGEFDHW | | (“HC”) amino acid sequence |
| | | G | HGTLVTVSS | |
| Ab 763 | 1526 | SYELTQPLSVSVALGQTARITCGGNNIESKNVHWYQQKPGQAPVVVMYRDTNRPS | ADI-41481 | Light chain variable region |
| | | GIPERFSGSNSGNTATLTISRAQAGDEADYYCQVWDSGTAGVVFGGGTKVTVL | | (“LC”) amino acid sequence |
| Ab 764 | 1527 | QVQLVQSGAEVKKPGSSVKVSCKASGGTFGSYTINWVRQAPGQGLEWMGGIIPIF | ADI-41482 | Heavy chain variable region |
| | | GATNYAQNFQGRVSITADKSTATAYMDLISLRSEDTAVYYCARLGRSSPLNSCTTTS | | (“HC”) amino acid sequence |
| | | CYFWGRGMDVWGQGTTVTVSS | | |
| Ab 764 | 1528 | QSVLIQPASVSGSPGQSITISCTGTISDVGIYNYVSWYQQHPGKAPKLIISDVSDRPS | ADI-41482 | Light chain variable region |
| | | GVSNRFSGSKSGITASLTITGLQAEDEADYYCSSYSSSSTLYVFGTGTKLTVL | | (“LC”) amino acid sequence |
| Ab 765 | 1529 | EVQLVESGPGLVKPSEALSLTCTVSGASISSYYWTWIRQSPRKGLEWIGYIYHTGRTN | ADI-41484 | Heavy chain variable region |
| | | YNPSLKRRVTMSVDWSKNQFSLTLSSVTAADTAVYYCARLKVVPAALESAILEHHFG | | (“HC”) amino acid sequence |
| | | LDVWGQGTTVTVSS | | |
| Ab 765 | 1530 | DIVMTQTPSTLSASIGDRVTLTCRASQSINRWLAWYQQKPGKAPKLLIYKASTLESG | ADI-41484 | Light chain variable region |
| | | VPSRFSGSGSGTEFTLTISGLQPDDFATYYCQQYNNFPYTFGPGTKVDIK | | (“LC”) amino acid sequence |
| Ab 766 | 1531 | EVQLLESGPGLVRPSETLSLTCTVSGGSLDSGPHYWNWIRQPPGKGLEWIGYIYYSV | ADI-41485 | Heavy chain variable region |
| | | STNYNPSLKSRVTISMDTSKNQFSLNLTSVTAADTAVYYCASFQLIYGPQIWGQGKK | | (“HC”) amino acid sequence |
| | | VTVSS | | |
| Ab 766 | 1532 | DIVLTQSPSSVSASVGDRVTITCRASQAISSWLIWSQHKPGKAPKVLIYAASSLQSGV | ADI-41485 | Light chain variable region |
| | | PSRFSGSGSGTDFTLTISSLQPEDFATYYCQQANNFPLTFGGGTKVEIK | | (“LC”) amino acid sequence |
| Ab 767 | 1533 | QVQLQQWGAGLLKPSETLSLTCSVYGGSFSGYYWSWIRQPPGKGLEWIGEINHSG | ADI-41486 | Heavy chain variable region |
| | | STNYNPSLKSRITISVDTSKNQFSLKLNSVTAADTAVYYCARGDYAFVTFDYWGQGT | | (“HC”) amino acid sequence |
| | | LVTVSS | | |
| Ab 767 | 1534 | QSVLTQPASVSGSPGQSITISCTGTSSDVGGYNYVSWYQQHPGKAPKLMIYEVSNR | ADI-41486 | Light chain variable region |
| | | PSGVSNRFSGSKSGNTASLTISGLQAEDEADYYCSSYTSSSTPVFGGGTKLTVL | | (“LC”) amino acid sequence |
| Ab 768 | 1535 | QVQLVESGGGLVKPGGSLRLSCAASGFTFSTYTMNWVRQAPGKGLEWVSSISGSS | ADI-41487 | Heavy chain variable region |
| | | AYIYYADSVKGRFTISRDNAKNSLFLQMNSLRAEDTAVYYCARLQGLVLPAVMPSYY | | (“HC”) amino acid sequence |
| | | YYSGMDVWGQGTTVTVSS | | |
| Ab 768 | 1536 | EIVMTQSPLSLPVTPGEPASISCRSSQSLLHSNGYNYLDWYLQKPGQSPQLLIYLASN | ADI-41487 | Light chain variable region |
| | | RASGVPDRFSGSGSGTDFTLKISRVEAEDVGVYYCMQALQTPQAFGQGTKVEIK | | (“LC”) amino acid sequence |
| Ab 769 | 1537 | EVQLVESGPGLVKPSETLSLTCTVSGGSINSDYWNWIRQTPGKGLEWIGYIFYSGNT | ADI-41488 | Heavy chain variable region |
| | | NYNPSLKSRVTISIDTSKKKFSLQVTSVTAADTAVYYCARMGTLKFDFDNWGQGTL | | (“HC”) amino acid sequence |
| | | VTVSS | | |
| Ab 769 | 1538 | QSALTQPRSVSGSPGQSVTIPCTGTSSDVGAYKYVSWYQQHPGKAPKLIIYDVTKRP | ADI-41488 | Light chain variable region |
| | | SGVPNRFSGSKSGNTASLTISGLQAEDEADYYCCSYAGTHTYWVFGGGTKVTVL | | (“LC”) amino acid sequence |
| Ab 770 | 1539 | EVQLVESGGGVVQPGRSLRLSCAASGFNFHNYAFHWVRQAPGKGLDWVAVTSYD | ADI-41489 | Heavy chain variable region |
| | | GSSAFYADSVKGRFTISRDNSKKILYLQMTSLRAEDTALYYCARGSSSWSGDYFDYW | | (“HC”) amino acid sequence |
| | | GQGILVTVSS | | |
| Ab 770 | 1540 | DIVMTQSPVTLSVSPGERATLSCRASQSVGSNLAWYQQKHGQTPRLLIYDASTRAT | ADI-41489 | Light chain variable region |
| | | SIPARFSGSGSGTEFTLTISSLQSEDFAVYYCQQYNKWPSYTFGQGTKVEIK | | (“LC”) amino acid sequence |
| Ab 771 | 1541 | EVQLLESGGGLVQPGGSLRLSCAASGFTFSSYSMNWVRQAPGKGLEWVSYMSSD | ADI-41491 | Heavy chain variable region |
| | | RSAIYYSDSVKDRFTISRDNAKNSLYLQMHSLRAEDTAVYYCARRYCSSTSCYRGLGY | | (“HC”) amino acid sequence |
| | | YYGMDVWGQGTTVTVSS | | |
| Ab 771 | 1542 | SYELTQPPSVSVAPGQTARITCGGSNIGNKDVHWYQQKPGQAPVLVVYDDSDRPS | ADI-41491 | Light chain variable region |
| | | GIPERFAGSNSGNTATLTISRVEAGDEADYYCQVWHSAGDHVVFGGGTKLTVL | | (“LC”) amino acid sequence |
| Ab 772 | 1543 | QVQLVQSGAEVRKPGSSVKVSCKASGGTFNSFVISWVRQAPGQGLEWMGRIIPIL | ADI-41492 | Heavy chain variable region |
| | | ATVDYAQKFQGRVTITADKSTTTAYMELSGLTSEDTAVYYCARDPPRWDTTMADY | | (“HC”) amino acid sequence |
| | | YYQGMDVWGQGTTVTVSS | | |
| Ab 772 | 1544 | DIRVTQSPASLSAFVGDRVTISCRASQSIGSFLNWYQQKPGKAPKLLIYAASSLQSGV | ADI-41492 | Light chain variable region |
| | | PSRFSGSGSGTDFTLAISSLQPEDFATYYCQQSYRSTPTFGGGTKVEIK | | (“LC”) amino acid sequence |
| Ab 773 | 1545 | QVQLVQSGAEVKKPGESLKISCKGSGYSFTKYWIGWVRQLPGKGLEWMGIIYPGD | ADI-41493 | Heavy chain variable region |
| | | SETIYSPSFQGQVTISADKSVSTAYLQWSSLKASDTAMYYCARQTFVFWGESHDAF | | (“HC”) amino acid sequence |
| | | DIWGQGTTVTVSS | | |
| Ab 773 | 1546 | QPVLTQPPSASGSPGQSVTISCTGTSSDVGAHNYVSWYQQHPGKAPKLMIYEVSK | ADI-41493 | Light chain variable region |
| | | RPSGVPDRFSGSKSGNTASLTVSGLQAEDEADYYCSSYAGSNNWVFGGGTKLTVL | | (“LC”) amino acid sequence |
| Ab 774 | 1547 | EVQLVESGGGLVQPGRSLRLSCTTSGFTFGDYAVTWVRQAPGKGLEWIGIMKSKTY | ADI-41494 | Heavy chain variable region |
| | | RGTTDYAASLRGRFSISRDDSKSIAYLQMTSLKSEDTGVYYCVRGHDYGDPFDYWG | | (“HC”) amino acid sequence |
| | | QGTLVTVSS | | |
| Ab 774 | 1548 | QSVLTQPASVSGSPGQSITISCTGGSSDVGYYNYVSWYQQHPGKAPKLLIYDVNNR | ADI-41494 | Light chain variable region |
| | | PSGVSDRFSGSKSGNTASLTISGLQPEDEADYYCSSYTRSRTWVFGGGTKLTVL | | (“LC”) amino acid sequence |
| Ab 775 | 1549 | QVQLVQSGGGLVEPGGSLRLSCAASGFTFSNTWMNWVRQAPGKGLTWVGRIKR | ADI-41495 | Heavy chain variable region |
| | | KTDFGTSDYAAPVKGRFTISRDDSKNMVFLQMNSLKIEDTGVYYCTTHPRPYLDTT | | (“HC”) amino acid sequence |
| | | AVVYWGQGTLVTVSS | | |
| Ab 775 | 1550 | QPVLTQPHSVSESPGKTVTISCIGSSGSITSNYVQWFQQRPGSAPTTVIYEDDQRPS | ADI-41495 | Light chain variable region |
| | | GVPDRFSGSIDSSSNSASLTISGLKTEDEADYYCQSYHHTNPWVFGGGTKLTVL | | (“LC”) amino acid sequence |
| Ab 776 | 1551 | QVQLVQSGAEVKKPGASVKVSCKASGYTFTSDDINWVRQATGQGLEWMGWMN | ADI-41496 | Heavy chain variable region |
| | | PNSGDTGYAQKFQGRVTMTRDTSISTAYMELSSLRSEDTAVYYCARVRIQCSGGRC | | (“HC”) amino acid sequence |
| | | SYWFFDLWGRGTLVTVSS | | |
| Ab 776 | 1552 | QSALTQPASVSGSPGQSITISCIGTSSDVGNYNLVSWYQHHPGKAPKVMIYEVNER | ADI-41496 | Light chain variable region |
| | | PSGVSNRFSGSKSGNTASLTISGLQAEDEADYYCCSYAGRSTWVFGGGTKLTVL | | (“LC”) amino acid sequence |
| Ab 777 | 1553 | QVQLVESGGGVVQPGRSLRLSCAASGFTFSNHAMHWVRQAPGKGLEWLSFISYD | ADI-41497 | Heavy chain variable region |
| | | GGVNFYRDSVKGRFTISRDNSKNTLYLQMSSLRPEDTAVYYCARDRVGRVVGASYY | | (“HC”) amino acid sequence |
| | | LDYWGRGALVTVSS | | |
| Ab 777 | 1554 | QSVVTQPPSVSVAPGQTASITCGGKHIGSKSVHWYQQKPGQSPVLVVHDDSDRPS | ADI-41497 | Light chain variable region |
| | | GILERFSGSNSGNTATLTINRVEAGDEADYYCQVWDNASDHPYVFGPGTKVTVL | | (“LC”) amino acid sequence |
| Ab 778 | 1555 | EVQLLESGGGLVKPGGSLRLSCAASGFIFSDYAMNWVRQTPGKGLEWVSSISDSSA | ADI-41498 | Heavy chain variable region |
| | | YKYYTGSVSGRFTISRDNAKNSLYLQMNDLRPEDTAVFYCARGQWRCSGASCYSPF | | (“HC”) amino acid sequence |
| | | DSWGQGTLVTVSS | | |
| Ab 778 | 1556 | SYELTQPPSVSVAPGQTARIPCGGNNIESKNVHWYQQKPGQAPVLVVYDDSDRPS | ADI-41498 | Light chain variable region |
| | | GIPERFSGSNSGSTATLTISRVEAGDEADYYCHVWHRSGDLREVFGSGTKVTVL | | (“LC”) amino acid sequence |
| Ab 779 | 1557 | EVQLVESGGVVVQPGGSLRLSCAASGFSFDDYTMYWVRQAPEKGLEWISLISWNG | ADI-41499 | Heavy chain variable region |
| | | GVTYYPDSVKGRFTVSRDNNKNSLYLQMDSLRPEDSAFYYCAKESLESSGHFLDYW | | (“HC”) amino acid sequence |
| | | GQGTLVTVSS | | |
| Ab 779 | 1558 | QPVLTQSRSVSGSPGQSVTISCIGTNSDVGGYHYVSWFQHHPGKAPKLMIYDVSRR | ADI-41499 | Light chain variable region |
| | | PSGVPARFSGSKSGNTASLSISGLRAEDEADYYCCSFAGTYTPYVFGTGTKLTVL | | (“LC”) amino acid sequence |
| Ab 780 | 1559 | QVQLVQSGAEVKKPGSSVKVSCKASGGIFSDFAISWVRQAPGQGLEWMGGIITIIG | ADI-41501 | Heavy chain variable region |
| | | TPEYAQKFQGRVRITADESTTTVFMELSRLTSEDTAVYYCARDSRYGSGWYWDHW | | (“HC”) amino acid sequence |
| | | GQGTLVTVSS | | |
| Ab 780 | 1560 | DIVMTQTPDSLAVSLGERATINCKSSQSVLYISNNKNYLAWYQQKPGQPPKLLIYW | ADI-41501 | Light chain variable region |
| | | ASTRDSGVPDRFSGSGSGTDFTLSISSLQPEDVAVYYCQQYYDTPRTFGQGTKLEIK | | (“LC”) amino acid sequence |
| Ab 781 | 1561 | QVQLVQSGAEVKKPGSSVKVSCKASGGPFSSDAMSWVRQAPGQGLEWMGGIIPI | ADI-41502 | Heavy chain variable region |
| | | LGSATYAQKFKGRVTIAADESTSTSYMELSGLKYEDTAVYYCARPFYDPLTGYFDTFN | | (“HC”) amino acid sequence |
| | | VWGQGTTVTVSS | | |
| Ab 781 | 1562 | QSVLTQPRSVPGSPGQSVTISCTGTSGDVGGYNYVSWYQQHPGKAPKLVIYDVTK | ADI-41502 | Light chain variable region |
| | | RPSGVPDRFSGSKSGNRASLTISGLQAEDEADYYCCSYAGSQTGYVFGTGTKVTVL | | (“LC”) amino acid sequence |
| Ab 782 | 1563 | EVQLLESGGGLVQPGGSLRLSCAASGFTFSDFPLSWVRQAPGKGLVWVSAISSSGG | ADI-41503 | Heavy chain variable region |
| | | DTYYADSVKGRFTISRDSSKNALYLQMNSLRAEDTAVYYCAKGQELLRPYYYGMDV | | (“HC”) amino acid sequence |
| | | WGQGTTVTVSS | | |
| Ab 782 | 1564 | QSALIQPASVSGSPGQSITISCTGTSSDVGGYNFVSWYQQHPGKAPKLMIFEVSNR | ADI-41503 | Light chain variable region |
| | | PSGVSHRFSGSKSGNTASLTISGLQAEDEADYYCSSCTSRFTYVFGTGTKLTVL | | (“LC”) amino acid sequence |
| Ab 783 | 1565 | EVQLLESGPGLLKTSETLSLTCTVSDGSISGYYWTWIRQPPGKGLECIGYISYSGSTNY | ADI-41504 | Heavy chain variable region |
| | | SPSLKSRVTISVDTSKNQFSLKLSSVTAADTAVYYCAKIGGYCNPTKCYGWFDPWGQ | | (“HC”) amino acid sequence |
| | | GTLVTVSS | | |
| Ab 783 | 1566 | QPVLTQPPSVSGAPGQRVTISCTGSSSNIGAGYDVHWYQQLPGTAPKLLIFGNTNR | ADI-41504 | Light chain variable region |
| | | PSGVPDRFSGSKSGTSASLAITGLQAEDEAAYYCQSYDSSLFYVVLGGGTKLTVL | | (“LC”) amino acid sequence |
| Ab 784 | 1567 | QVQLQQSGAGLLKPSETLSLTYVVYGGSFSGYYWSWIRQPPGKGLEWVGDINHST | ADI-41505 | Heavy chain variable region |
| | | TTNYNPSLESRITISIDTSKNQFSLNLSSVTAADSAVYYCARGPKECTSSSCDRFGVDY | | (“HC”) amino acid sequence |
| | | FYYGMDVWGRGTTVTVSS | | |
| Ab 784 | 1568 | QSVLTQPPSVSGAPGQRVTISCTGSSANIGAGYDVHWYQQFPGTAPKLLIFGNSNR | ADI-41505 | Light chain variable region |
| | | PSGVPDRFSGSKSGTSASLAITGLQAGDEADYYCQSYDGTLGGWVFGGGTQLTVL | | (“LC”) amino acid sequence |
| Ab 785 | 1569 | QVTLKESGPTLVKPTQTLRLTCTFSGFSLNVISGVGVGWIRQPPGKALEWLALIYWD | ADI-41507 | Heavy chain variable region |
| | | DDKRYSPSLKSRLTIAKDTSKNQVVLTMTNMDPVDTATYYCAHKGGSIEAAVGFDY | | (“HC”) amino acid sequence |
| | | WGQGTLVTVSS | | |
| Ab 785 | 1570 | QSVLTQPPSVSGAPGQRVIISCTGSSSNIGAGFAVHWYQQLPGTAPKLLIYANTNRP | ADI-41507 | Light chain variable region |
| | | SGVPDRFSGSKSGTSASLAITGLQAEDEADYYCQSYDTSLSGFYVFGTGTKLTVL | | (“LC”) amino acid sequence |
| Ab 786 | 1571 | QVQLVQSGAEVRKPGASVKVSCKASGYGFRSYDLTWVRQAPGKGLEWVGWISAY | ADI-41508 | Heavy chain variable region |
| | | SGGTNYAQTLQGRVTMTTDTSTSTAYMELRSLGPDDTAVYYCARAGLYGSGSPDG | | (“HC”) amino acid sequence |
| | | FDSWGQGTLVTVSS | | |
| Ab 786 | 1572 | SYELTQPPSVSVSPGQTASITCSGDKLGDKYASWYQQRPGQSPVLVISQDTKRPSGI | ADI-41508 | Light chain variable region |
| | | PERFSGSTSGNTAILTISGTQAMDEADYYCLAWDSSTAWVFGGGTKLTVL | | (“LC”) amino acid sequence |
| Ab 787 | 1573 | QVQLVESGGGLVQPGGSLRLSCAASGFTFSDYAMSWVRQAPGKGLVWVSSISGS | ADI-41515 | Heavy chain variable region |
| | | GKFTYYEDSLRGRVTISRDNSKNTVYLHMNSLRTEDTALYYCARLRIPVINEVDGAM | | (“HC”) amino acid sequence |
| | | DVWGQGTTVTVSS | | |
| Ab 787 | 1574 | SYELTQLPSVSVSPGQTARITCSGDALPKKFAYWYQQKSGQAPVLVIYEDTGRPSGI | ADI-41515 | Light chain variable region |
| | | PERFSGSTSGTTATLTINGAQVEDEGDYYCYSADSSDNQGVFGGGTKVTVL | | (“LC”) amino acid sequence |
| Ab 788 | 1575 | EVQLLESGPRLVKPSETLSLTCIVSGGFISYDYWSWIRQPAGKGLEWIGRIYAGGIPK | ADI-41516 | Heavy chain variable region |
| | | YNPSLKSRVIMSLDMSNNQFSLRLKSVTAADSAVYYCARAEPCSGDCFLGENPFDS | | (“HC”) amino acid sequence |
| | | WGQGTLVTVSS | | |
| Ab 788 | 1576 | QSVLTQPPSASGTPGQRVTISCSGSSSSIGSNYVYWYQQLPGTAPKLLIHKDNERPS | ADI-41516 | Light chain variable region |
| | | GVPDRFSGSKSGTSASLAISGLRSEDEGDYSCAAWDDSLSGWVFGGGTKLTVL | | (“LC”) amino acid sequence |
| Ab 789 | 1577 | QVQLVQSGGGLVQPGGSLRLACAASGFTLSGYAMNWVRQAPGKGLEWVSSISGS | ADI-41517 | Heavy chain variable region |
| | | GGSTYYADSVKGRFTTSRDNSKNTVFLHMNSLRAEDTAIYYCATVPWETGPFDHW | | (“HC”) amino acid sequence |
| | | GQGTLVTVSS | | |
| Ab 789 | 1578 | QSVLTQPPSVSGAPGQRVTISCTGSSSNIGAGYAVHWYQQLPGTAPKLLIHGTTNR | ADI-41517 | Light chain variable region |
| | | PSGVPDRFSGSKSGTSASLAITGLQAEDEADYYCQSYDSRLSGYVFGTGTKLTVL | | (“LC”) amino acid sequence |
| Ab 790 | 1579 | EVQLVESGGGLVKPGGSLRLSCAASGFTFSSYSMNWVRQAPGKGLEWVSSISSSSS | ADI-41518 | Heavy chain variable region |
| | | YINYADSVKGRFTISRDNAKNSLYLQMNSLRAEDTALYYCARDLGYCSDTSCTPGIG | | (“HC”) amino acid sequence |
| | | YWGQGTLVTVSS | | |
| Ab 790 | 1580 | QPVLTQPPSVSGAPGQRVTISCTGSSSNIGAGYDVHWYQQLPGTAPKLLIYGNSNR | ADI-41518 | Light chain variable region |
| | | PSGVPDRFSGSKSGTSASLAITGLQAEDEADYYCQSYDSGLSPWVFGGGTKLTVL | | (“LC”) amino acid sequence |
| Ab 791 | 1581 | QVQLVESGPGLVKPSETLSLTCNVSGGSIITSGSYWGWIRQPPGKGLTWIGSISYSG | ADI-41519 | Heavy chain variable region |
| | | TTYYNPSLRSRLTISLDTSRNHFSLQLTSVSAADTAVYYCARAFYEVWTGSEIPGDFD | | (“HC”) amino acid sequence |
| | | RWGQGTLVTVSS | | |
| Ab 791 | 1582 | EIVLTQSPGTLSLSPGERATLSCRASQSVSSSYLAWYQQKPGQAPRLLIYGASSRAIDI | ADI-41519 | Light chain variable region |
| | | PDRFSGSGSGTDFTLTISRLEPEDFAVYYCQQFRRSPWTFGQGTKVDIK | | (“LC”) amino acid sequence |
| Ab 792 | 1583 | EVQLLESGGGVVRPGGSLRLSCAASGFSFDDYGMTWVRQAPGKGLEWVSGINW | ADI-41520 | Heavy chain variable region |
| | | NGISTDYADSVKGRFTISRDNAKNSVYLQMNSLRAEDTALYYCARIGGVVVIASTAY | | (“HC”) amino acid sequence |
| | | YYGMDVWGQGTTVTVSS | | |
| Ab 792 | 1584 | DIQLTQSPSSLSAYVGDRVTITCRASQSIRNHLNWYQQKPGKAPQLLIYTASSLQDG | ADI-41520 | Light chain variable region |
| | | VPSRFSGSGSGTDFTLAISSLQPEDFATYYCQQSHSMPPTFGQGTRLEIK | | (“LC”) amino acid sequence |
| Ab 793 | 1585 | EVQLVESGGGLVQPGRSLRLSCAASGFTFDDFAMDWVRQVPGKGLEWVSGISWN | ADI-41521 | Heavy chain variable region |
| | | GVSKDYAGSVKGRFTISRDNAKNSLYLQMNSLRAEDTALYFCAKARRDVYNWGDA | | (“HC”) amino acid sequence |
| | | FDIWGQGTMVTVSS | | |
| Ab 793 | 1586 | DIRLTQSPGTLSLSPGERATLSCRASQPLNSNYLAWYRQKPGQAPRLLIFDASSRAT | ADI-41521 | Light chain variable region |
| | | GVPDRISGSGSGTDFTLTVSRLEPEDIAVYYCQQYASSPWTFGLGTKVEIK | | (“LC”) amino acid sequence |
| Ab 794 | 1587 | QVQLVQSGAEVKKPGSSVKVSCKASGGTFNNFPISWVRQAPGQGLEWMGGIIPM | ADI-41522 | Heavy chain variable region |
| | | FGRANYAQKFQGRVTITADESTTTVYMALRSLRSEDTAVYYCARPDYDVLTGFEGA | | (“HC”) amino acid sequence |
| | | FDIWGQGTMVTVSS | | |
| Ab 794 | 1588 | QSALTQPASVSGSPGQLITISCTGTSRDVGGYNYVSWYQQHPGKAPKLMIYDVTNR | ADI-41522 | Light chain variable region |
| | | PSGVSNRFSGSKSGNTASLTISGLQSEDEADYYCSSYTSTTTWVFGGGTKLTVL | | (“LC”) amino acid sequence |
| Ab 795 | 1589 | QVQLVQSGAEVKKPGESLRISCKGSGDTFSNYWIGWVRQMPGKGLEWMGIIYPG | ADI-41523 | Heavy chain variable region |
| | | DSDTRYSPSFQGQVTFSADKSISTAYLQWSSLKASDTAMYYCVRQVGGVVVTDTD | | (“HC”) amino acid sequence |
| | | NYYYGMDVWGQGTTVTVSS | | |
| Ab 795 | 1590 | DIRLTQSPSSLSASVGDRVTITCRASQSIRSYLNWYQQKPGKAPKLLIYSASSLQSGVP | ADI-41523 | Light chain variable region |
| | | SRFSGSGSGTDFTLTISSLQPEDFATYYCQQSHSTPLTFGPGTKVDIK | | (“LC”) amino acid sequence |
| Ab 796 | 1591 | EVQLVESGGGLVQPGRSLRLSCTGSGFTFGDYAISWFRQAPGKGLEWVGFIRSKPY | ADI-41524 | Heavy chain variable region |
| | | GGTTEYAASVKGTFTISRDDSKSIAYLQMNSLKTGDTAVYFCTRGIWGITMIVPWSD | | (“HC”) amino acid sequence |
| | | PWGQGTLVTVSS | | |
| Ab 796 | 1592 | DIVMTQTPLSLPVTPGEPASISCRSSQSLLHSNGFNYLAWYLQKPGQSPQLLIYLNSN | ADI-41524 | Light chain variable region |
| | | RASGVPDRFSGSGSGTDFTLKISRVEAEDVGVYYCMQALQTPLTFGPGTKLEIK | | (“LC”) amino acid sequence |
| Ab 797 | 1593 | QVQLVQSGAEMKKPGSSVKVSCKASGRTFKYFALNWMRRAPGHGLEWIGGDIPIS | ADI-41525 | Heavy chain variable region |
| | | GSTNYAQKFQGRVTITADESASTAYMEVSRLRSDDTAVYYCASLHYDVSTGFSDAF | | (“HC”) amino acid sequence |
| | | DIWGQGTMVTVSS | | |
| Ab 797 | 1594 | QSVLTQPASVSGSPGQSITISCTGTSSDVGAYNYVSWYQHHPGKAPKLMIFDVSNR | ADI-41525 | Light chain variable region |
| | | PSGVSNRFSGSKSGNTASLTISGLQAEDEADYYCSSYRSTFSYVFGTGTKVTVL | | (“LC”) amino acid sequence |
| Ab 798 | 1595 | QVQLVQSGAEVKKPGASVKVSCEASGYTFTDYYMHWVRQAPGQGLEWMGWIN | ADI-41526 | Heavy chain variable region |
| | | PNSGVTKIAQNFQGRVTMTRDTSITTAYMDLSRLRSDDTAVYYCARVVDGDYDN | | (“HC”) amino acid sequence |
| | | WFDFWGQGTLVTVSS | | |
| Ab 798 | 1596 | SYVLTQPPSASGTPGQRVTISCSGSTSNIGTNTVNWYQQPPGMAPKLLIYANNQRP | ADI-41526 | Light chain variable region |
| | | SGVPDRFSGSKSGTSASLAISGLQSEDEADYHCAVWDDSLPGWVFGGGTKLTVL | | (“LC”) amino acid sequence |
| Ab 799 | 1597 | EVQLLESGGGLVQPGGSLRLSCAASGFTFTSYWMSWVRQAPGQGLEWVATIKQD | ADI-41527 | Heavy chain variable region |
| | | GSEKYYVDSVKGRFTISRDNAKNSLYLQMNSLGAEDTAVYYCARDMYCSTTTCYFF | | (“HC”) amino acid sequence |
| | | ETYYYNGMDVWGQGTTVTVSS | | |
| Ab 799 | 1598 | DIRLTQSPSSVSASVGDRVTITCRASQVTSTWLAWYQQNPGKAPKLLIYAASRLQSG | ADI-41527 | Light chain variable region |
| | | VPSRFSGSGSGTEFTLTISSLQPEDFATYYCQQANSFPLTFGGGTKVEIK | | (“LC”) amino acid sequence |
| Ab 800 | 1599 | EVQLVESGGGVVQPGRSLRLSCAASGFTFSSYAMHWVRQAPGKGLEWVAVISFD | ADI-41528 | Heavy chain variable region |
| | | GSSDYYADSVKGRFTISRDSSKNTLYLRMNSLRAEDTAVYYCARRAVEYSIYNNDAF | | (“HC”) amino acid sequence |
| | | DVWGQGTTVTVSS | | |
| Ab 800 | 1600 | SYELTQPPSVSVSPGQTASITCSGDKLGNKFTFWYQQKSGQSPVLVIYQETKRPSGIP | ADI-41528 | Light chain variable region |
| | | ERFSGSNSGNTATLTISGTQSMDEADYYCQAWDSSTAFFGGGTKLTVL | | (“LC”) amino acid sequence |
| Ab 801 | 1601 | EVQLVQSGAEVRRPGSSVKVSCKASGGTLDTDSISWVRQVPGQGLVWVGGVIPIL | ADI-41529 | Heavy chain variable region |
| | | GSVVYARKFQGRVTITADGSTSTAYMELRSLRSEDTAMYYCASQFYDFRRGYFDAF | | (“HC”) amino acid sequence |
| | | DIWGQGTTVTVSS | | |
| Ab 801 | 1602 | ETTLTQSPGILSLSPGERATLSCRATQTVISNYINWYQQKPGQAPRLLIYGASSRATGI | ADI-41529 | Light chain variable region |
| | | PDRFSGSGSGTDFTLTISRLEPEDFAVYYCQRYDSSPPGFTFGPGTKVDIK | | (“LC”) amino acid sequence |
| Ab 802 | 1603 | QVQLVESGAEVKKPGASVKVSCRASGYTFSAYDINWVRQAPGQGLEWVGWMNP | ADI-41530 | Heavy chain variable region |
| | | NSGNTGYALRFQGRVTMTRDTSINTAYMELSSLRSDDTAVYYCAAQLWYPNWGQ | | (“HC”) amino acid sequence |
| | | GTLVTVSS | | |
| Ab 802 | 1604 | SYELTQPPSVSVGLGQTASITCGGNNIGSKSVHWYQQKPGQAPTLVIYRDTNRPSGI | ADI-41530 | Light chain variable region |
| | | PERFSGSNSENTATLTISRAQAGDEADFYCQVSDNYSWVFGGGTKLTVL | | (“LC”) amino acid sequence |
| Ab 803 | 1605 | EVQLLESGGDLVQPGGSLRLSCAASGFTFFSYALNWVRRTPGKGLEWVSGISGSGG | ADI-41531 | Heavy chain variable region |
| | | STYYADSVKGRFTISRDNSKSTLYLQMNSLKVDDTAVYFCAKDFQHDYGDPYRSYYF | | (“HC”) amino acid sequence |
| | | DHWGQGTLVTVSS | | |
| Ab 803 | 1606 | DIQLTQSPSSLAASVGDRVTITCQASRDIRKSLNWYQVKPGKAPKLLISDASYLETGV | ADI-41531 | Light chain variable region |
| | | PPRFSGSGFGTH FTFTISSLQPEDIATYYCQQYDNLPPPTFGGGTKVDIK | | (“LC”) amino acid sequence |
| Ab 804 | 1607 | QVQLVQSGAEVKKPGESLKISCKGSGYSFTSSWIGWVRQMPGKGLEWMGIIYPGD | ADI-41532 | Heavy chain variable region |
| | | SDTRYSPSIQGRVTISADKSITTAYLQWSSLKASDTATYYCAKFGGYADAYFYHGMD | | (“HC”) amino acid sequence |
| | | VWGQGTTVTVSS | | |
| Ab 804 | 1608 | SYVLTQPPSASGTPGQRVTISCSGSSSNVGSNTVNWYQQLPGTAPKLLIHFNNQRP | ADI-41532 | Light chain variable region |
| | | SGVPDRFSGSKSGTSASLAISGLQSEDEADYYCAAWDDSLNTWVFGGGTKVTVL | | (“LC”) amino acid sequence |
| Ab 805 | 1609 | QVQLVESGGGVVQPGRSLRLSCAASGFTFSSYAMHWVRQAPGKGLEWLAVISFD | ADI-41533 | Heavy chain variable region |
| | | GSSEFYGDSVRGRFTISRDNSKNTLYLRVNSLRAEDTALYYCARRSLKYSMYNNDAF | | (“HC”) amino acid sequence |
| | | DVWGQGTTVTVSS | | |
| Ab 805 | 1610 | QPVLTQPPSVSVSPGQTASITCSGDKLGNKFTFWYQQKSGQSPVLVIYQESQRPSGI | ADI-41533 | Light chain variable region |
| | | PERFSGSNSGNTATLTIRGAQAMDEADYYCQAWDSSTAFFGGGTKLTVL | | (“LC”) amino acid sequence |
| Ab 806 | 1611 | QVQLVQSGGGVVQPGRSLRLSCAASGFTFSNYAMHWVRQAPGKGLEWVTLISYD | ADI-41534 | Heavy chain variable region |
| | | GSAQDYADSVKGRITISRDNSKNTLYLQMSSLRPEDTAVYYCARYYCTNDVCSSSAL | | (“HC”) amino acid sequence |
| | | DIWGQGTTVTVSS | | |
| Ab 806 | 1612 | SYELIQPPSVSVSPGQTASITCSGDKLGNKFTCWYQQKPGQSPVLVIYQDSKRPSGIP | ADI-41534 | Light chain variable region |
| | | ERFSGSNSGNTATLTISGTQAMDEADYYCQAWDSSTVVFGGRTKLTVL | | (“LC”) amino acid sequence |
| Ab 807 | 1613 | QVTLKESGPALVKPTQTLTLTCTFSGFSLSTSRMCVSWIRQSPGKALEWLARIDWD | ADI-41535 | Heavy chain variable region |
| | | DDKFFSTSLKTRLTISKDTSRNQVVLTMTNMDPVDTATYYCARTTVYASGGYYLYYF | | (“HC”) amino acid sequence |
| | | DYWGQGTLVTVSS | | |
| Ab 807 | 1614 | DIQLTQSPSSLPASVGDRVTITCRASQRIASYLNWYQQKPGKAPKVLIYAASNLQSG | ADI-41535 | Light chain variable region |
| | | VPSRFSGSGSGTDFTLTINSLQPEDFATYYCQQSYTTPWTFGQGTKVEIK | | (“LC”) amino acid sequence |
| Ab 808 | 1615 | EVQLVESGAGLLKPSETLSLTCVVYGGSFSGYYWSWIRQPPGKGLEWVGDINHSTT | ADI-41536 | Heavy chain variable region |
| | | TNYNPSLESRITISIDTSKNQFSLNLSSVTAADSAVYYCARGPKECTSSSCDRFGVDYF | | (“HC”) amino acid sequence |
| | | YYGMDVWGRGTTVTVSS | | |
| Ab 808 | 1616 | QSVLTQPPSVSGAPGQRVTISCTGSSANIGAGYDVHWYQQFPGTAPKLLIFGNSNR | ADI-41536 | Light chain variable region |
| | | PSGVPDRFSGSKSGTSASLAITGLQAEDEADYYCQSYDGTLGGWVFGGGTQLTVL | | (“LC”) amino acid sequence |
| Ab 809 | 1617 | EVQLLESGGGLVQPGGSLRLSCAASEFTFSRYPMSWVRQAPGKGLEWVSGISVSG | ADI-41537 | Heavy chain variable region |
| | | DSTYYADSVKGRLTISRDNSKNTLYLQMNSLRAEDTAVYYCAIDHYDTSGYYGMDV | | (“HC”) amino acid sequence |
| | | WGQGTTVTVSS | | |
| Ab 809 | 1618 | DIRLTQSPLSLPVTPGEPASISCRSSRSLLRSNGYNYLDWYLQKPGQSPQLLIYLGSNR | ADI-41537 | Light chain variable region |
| | | ASGVPDRFSGSGSGTDFTLKISRVEAEDVGVYYCMQALQSSYTFGQGTKLEIK | | (“LC”) amino acid sequence |
| Ab 810 | 1619 | EVQLVESGGGLVKPGGSLRLSCAASGFTLSTYGVNWVRQAPGKGLEWVSSISSSGN | ADI-41538 | Heavy chain variable region |
| | | NIHYADSVKGRFTVFRDNAKHSMYLQMNSLRAEDTAVYYCARSLDYSNYYYYYGLD | | (“HC”) amino acid sequence |
| | | VWGQGTTVTVSS | | |
| Ab 810 | 1620 | EIVLTQSPDSLAVSLGERATINCKSSQSIFYSSNNMNYLAWYQQKAGQPPKLLIYWA | ADI-41538 | Light chain variable region |
| | | STRESGVPDRFSGSGSGTDFTLTISSLQAEDVAVYYCHQYYSIPLTFGGGTKVEIK | | (“LC”) amino acid sequence |
| Ab 811 | 1621 | QVQLVESGAEVKKPGASVKVSCKASGYNFIDYGISWVRQAPGQGLEWVGWISAY | ADI-41539 | Heavy chain variable region |
| | | NGNTNYAQKLQGRVTMTTDTSTNTAYMELRSLRSDDTALYYCARDSSSLHPTYYYY | | (“HC”) amino acid sequence |
| | | YPMDVWGQGTTVTVSS | | |
| Ab 811 | 1622 | DIVMTQSPATLSVSPGERATLSCRASQSVSSRLAWYQQKPGQAPRLLIYGASTRAT | ADI-41539 | Light chain variable region |
| | | DVPARFSGSGSGTEFTLTISSLQSEDFAVYYCQQYNNWPPERTFGQGTKVEIK | | (“LC”) amino acid sequence |
| Ab 812 | 1623 | QVQLQQWGAGLLKPSETLSLTCGVYGGSFTGYQWSWIRQSPGKGLEWIGDIDHG | ADI-41540 | Heavy chain variable region |
| | | GNTNYRPSLKSRIITSVNMSKKEFSLKLASVTAADTAVYYCARGVGFLEFSGGPTGRR | | (“HC”) amino acid sequence |
| | | RNWFDSWGQGTLVTVSS | | |
| Ab 812 | 1624 | DIQLTQSPGTLSLSPGEGATLSCRASQSVGGSYLAWYQQRPGQAPRLLIYGASNRA | ADI-41540 | Light chain variable region |
| | | ADSPDRFSGSGSATDFTLTISRLEPEDFAVYYCQQYGSSPWTFGQGTKVEIK | | (“LC”) amino acid sequence |
| Ab 813 | 1625 | QITLKESGPTLVKPTQTLTLTCTFSGFSLSSSGVGVGWIRQPPGKALEWLALIYWDD | ADI-41541 | Heavy chain variable region |
| | | DKRYSPSLKSRLTITKDTSKNQVVLTMTNMDPVDTATYYCAHRGPYYYDMSGYYYE | | (“HC”) amino acid sequence |
| | | AFDIWGQGTTVTVSS | | |
| Ab 813 | 1626 | SYELMQPPSVSVAPGQTARITCGGNNIGSKGVHWYQQKPGQAPVLVVYDDNDRP | ADI-41541 | Light chain variable region |
| | | SGIPERFSGSNSGNTATLTISRVEAGDEADYYCQVWDSSSDHHYVFGTGTKVTVL | | (“LC”) amino acid sequence |
| Ab 814 | 1627 | EVQLVESGVAVKKPGESLKISCKGSGYNFDSFWIGWVRQLPGKGLEWMGIIFPGDS | ADI-41542 | Heavy chain variable region |
| | | DTRYGPSFQGQVTISADKSINTAYLQWRSLKASDTAMYYCARHGLGGYDNSGYNL | | (“HC”) amino acid sequence |
| | | WGHGTMVTVSS | | |
| Ab 814 | 1628 | DIVMTQSPSSLSASVGDRVTITCQASHDISTSLNWYQQKPGKAPNLLISDASTLERG | ADI-41542 | Light chain variable region |
| | | VPSRFSGGGSGTEFTFTISSLQPEDIATYYCQQFENLPITFGQGTRLEIK | | (“LC”) amino acid sequence |
| Ab 815 | 1629 | QVQLVQSGAEVKKPGASVRVSCKASGYTLTGYYIHWLRQAPGQGLEWVGRINPNT | ADI-41543 | Heavy chain variable region |
| | | GETSYSQKFQGRVIMTRDTSVSTAYVDLSRLRSRDTAVYFCARSDVMITVTAEGDFS | | (“HC”) amino acid sequence |
| | | YYYYRFDVWGQGTTVTVSS | | |
| Ab 815 | 1630 | DIVMTQTPLSLPVTPGEPASISCRSSQSLLHSNGHNYLDWYLQKPGQSPQLLIYLGSI | ADI-41543 | Light chain variable region |
| | | RASGVSDRFSGSGSGTDFTLKISRVEAEDVGIYYCMQALQTPHFGGGTKVEIK | | (“LC”) amino acid sequence |
| Ab 816 | 1631 | QVQLVQSGAEVKKPGESLKISCKGSGYSFTNYWIGWVRQMPGKGLEWMGIIFPA | ADI-41544 | Heavy chain variable region |
| | | DSDTRYSPSFQGQVTISADKSVSTAYLQWTSLKASDTAIYYCARLGVAAAGGYWGQ | | (“HC”) amino acid sequence |
| | | GTLVTVSS | | |
| Ab 816 | 1632 | DIQVTQSPSSLSASVGDRVTITCQASQDISNYLNWYQQKPGKAPKLLIHDASTLETG | ADI-41544 | Light chain variable region |
| | | VPSRFSGRGSGTDFTFTISSLQPEDIATYYCQQYDNLPPTFGGGTKVEIK | | (“LC”) amino acid sequence |
| Ab 817 | 1633 | QVQLVESGPGLVKPSETLSLTCTVSGGSISRYYWSWIRQSPGKGLEWIGYIYHSVITN | ADI-41545 | Heavy chain variable region |
| | | YNPSLKSRVTISIDMSKNQFSLKLSSVTAADTAVYYCASRPLINGYGPDNYFDYWGQ | | (“HC”) amino acid sequence |
| | | GTLVTVSS | | |
| Ab 817 | 1634 | SYVLTQPPSVSVAPGQTARITCGGNNIGSKSVHWYQRKPGQAPVLVVYDDSDRPS | ADI-41545 | Light chain variable region |
| | | GIPERFSGSNSGNTATLTIIRVEAGDEADYYCQVWDNSSDHPVFGGGTKLTVL | | (“LC”) amino acid sequence |
| Ab 818 | 1635 | QVQLVQSGAEVKKPGESLKISCKGSGYSFTNYWIGWVRQMPGKGLEWMGIIFSAD | ADI-41546 | Heavy chain variable region |
| | | SDTRYSPSFQGQVTISADKSISTAYLQWSSLKASDTAMYYCARQWGITGDAFDIWG | | (“HC”) amino acid sequence |
| | | QGTMVTVSS | | |
| Ab 818 | 1636 | DIQVTQSPSFLSASVGDRVTITCRASQGISGYLAWYQQKPGKAPKLLIYAASTLQSG | ADI-41546 | Light chain variable region |
| | | VPSRFSGSGSGTEFTLTISSLQPEDFATYYCQQLNSYPYTFGQGTKVEIK | | (“LC”) amino acid sequence |
| Ab 819 | 1637 | QVQLVQSGAEVKKPGSSVKVSCKASGGSFSSNTINWVRQAPGQGLEWMGGIIPVF | ADI-41547 | Heavy chain variable region |
| | | ETPNYAQKFQGRVSFTADESTRTAYMELSSLRSEDTAVYFCARQGMSYYDTNGNY | | (“HC”) amino acid sequence |
| | | YVGWFDTWGQGTLVTVSS | | |
| Ab 819 | 1638 | EIVLTQSPGTLSLSPGERATLSCRASQSLNNNYLAWYQRKPGQAPRLLIYGAGAFSR | ADI-41547 | Light chain variable region |
| | | ATGIPDRFSGSGSGTDFTLTISRLEPEDFALYYCQQYGSSPLTFGQGTRLEIK | | (“LC”) amino acid sequence |
| Ab 820 | 1639 | QVQLQQWGPGLVKPSETLSLTCTVSGASITSHYWSWLRQPAGKGLEWIGRFYPSG | ADI-41548 | Heavy chain variable region |
| | | TTEKTPSLKSRVTLSVDTSKNHFSLKLTSVTAADTAVYYCARDSYDDIAGSYEYYFAD | | (“HC”) amino acid sequence |
| | | WGQGTLVTVSS | | |
| Ab 820 | 1640 | EIVLTQSPATLSVSPGERATLSCRASQSVSSNLAWYQQKPGQAPRLLIYDISTRATGV | ADI-41548 | Light chain variable region |
| | | PARFSGSGSGTEFTLTITSLQSEDFTVYYCQQYNNWPPTFGQGTKLEIK | | (“LC”) amino acid sequence |
| Ab 821 | 1641 | EVQLLESGGGVVQPGGSLRLSCAASGFTFSGYGMHWVRQAPGKGLEWVAFIQYN | ADI-41549 | Heavy chain variable region |
| | | GSNKYYADSVKGRFTISRDNSKNTLYVQLNSLRAEDTAVYYCATDILVVPAATPLISY | | (“HC”) amino acid sequence |
| | | YFGMDVWGQGTTVTVSS | | |
| Ab 821 | 1642 | QSALTQPASVSGSPGQSITISCTGTSSDVGGYNYVSWYQQYPGKAPKLMIYEVTNR | ADI-41549 | Light chain variable region |
| | | PSGVSNRFSGSKSGNTASLTISGLQAEDEADYYCCSYTSTNTRVFGTGTKVTVL | | (“LC”) amino acid sequence |
| Ab 822 | 1643 | QVQLVQSGAEVKMPGASVRVSCKASGYTLGSHGITWVRQAPGQGLEWMGWISA | ADI-41550 | Heavy chain variable region |
| | | NNFNTHYAQKFQGRVTMTTDTSTSTAYMELRSLRSDDTAVYYCAREVMGHMVET | | (“HC”) amino acid sequence |
| | | ISFDYWGQGTLVTVSS | | |
| Ab 822 | 1644 | QPVLTQPPSVSVAPGQTARITCGGNNIGSESVHWYQQKPGQAPVLVVHDDSDRP | ADI-41550 | Light chain variable region |
| | | SGIPERFSGSNSGNTATLTISRVEAGDEADYYCQVWDFTPDHPVFGGGTKVTVL | | (“LC”) amino acid sequence |
| Ab 823 | 1645 | QVQLQESGGGVVQPGGSLRLSCAASGFTFSRHWMHWVRQVPGKGLVWVSRINS | ADI-41551 | Heavy chain variable region |
| | | DESTIDYADSVKGRFTISRDNAKNTLYLQMNSLRAEDTAVYYCVRDMVAVPGTTG | | (“HC”) amino acid sequence |
| | | GDYWGQGTLVTVSS | | |
| Ab 823 | 1646 | SYELTQPPSVSVSPGQTADITCSGDKLGDKYACWYQQRAGQSPILVLYQDTRRPSGI | ADI-41551 | Light chain variable region |
| | | PERFSGSNSGDTATLTISGTQAMDEADYYCQAWDSSTAWVFGGGTKLTVL | | (“LC”) amino acid sequence |
| Ab 824 | 1647 | QVQLVQSGGGLVKPGGSLRLSCAASGFTFSSYSMNWVRQAPGKGLEWVSSISSSS | ADI-43643 | Heavy chain variable region |
| | | SYIYYADSVKGRFTISRDNAKNSLYLQMNSLRAEDTAVYYCARVLSGYSYGYDYWG | | (“HC”) amino acid sequence |
| | | QGTLVTVSS | | |
| Ab 824 | 1648 | QSVLTQPPSVSGAPGQRVTISCTGSSSNIGAGYDVHWYQQLPGTAPKLLIYGNSNR | ADI-43643 | Light chain variable region |
| | | PSGVPDRFSGSKSGTSASLAITGLQAEDEADYYCQSYDSSLSGSVFGTGTKVTVL | | (“LC”) amino acid sequence |
| Ab 825 | 1649 | EVQLVESGGGLVQPGGSLRLSCAASGFTFSSYAMSWVRQAPGKGLEWVSAISGSG | ADI-43644 | Heavy chain variable region |
| | | GSTYYADSVKGRFTISRDNSKNTLYLQMNSLRAEDTAVYYCAKDFTVVHPLQQLTYY | | (“HC”) amino acid sequence |
| | | YFDYWGQGTLVTVSS | | |
| Ab 825 | 1650 | DIVLTQSPATLSLSPGERATLSCRASQSVSSYLAWYQQKPGQAPRLLIYDASNRATGI | ADI-43644 | Light chain variable region |
| | | PARFSGSGSGTDFTLTISSLEPEDFAVYYCQQRSNWPPGFTFGGGTKVEIK | | (“LC”) amino acid sequence |
| Ab 826 | 1651 | QVQLVQSGAEVKKPGSSVKVSCKASGGTFSSYAISWVRQAPGQGLEWMGGIIPIF | ADI-43645 | Heavy chain variable region |
| | | GTANYAQKFQGRVTITADESTSTAYMELSSLRSEDTAVYYCARGWRGGGMTGSYY | | (“HC”) amino acid sequence |
| | | YYGMDVWGQGTTVTVSS | | |
| Ab 826 | 1652 | DIQVTQTPSTLSASVGDRVTITCRASQSISSWLAWYQQKPGKAPKLLIYKASSLESGV | ADI-43645 | Light chain variable region |
| | | PSRFSGSGSGTEFTLTISSLQPDDFATYYCQQHRGTFGQGTKVDIK | | (“LC”) amino acid sequence |
| Ab 827 | 1653 | EMQLMQSGGVVVQPGGSLRLSCAASGFTFDDYAMHWVRQAPGKGLEWVSLIS | ADI-43646 | Heavy chain variable region |
| | | WDGGSTYYADSVKGRFTISRDNSKNSLYLQMNSLRAEDTALYYCAKDFDPLVVPAA | | (“HC”) amino acid sequence |
| | | MCFDYWGQGTLVTVSS | | |
| Ab 827 | 1654 | QSVLIQPASVSGSPGQSITISCTGTSSDVGGYNYVSWYQQHPGKAPKLMIYDVSNR | ADI-43646 | Light chain variable region |
| | | PSGVSNRFSGSKSGNTASLTISGLQAEDEADYYCSSYTSSSTLYVFGTGTKLTVL | | (“LC”) amino acid sequence |
| Ab 828 | 1655 | EVQLVESGGGLVQLGGPLRLSCAASGFTFSSYAMSWVRQAPGKGLEWVSAISGSG | ADI-43647 | Heavy chain variable region |
| | | GSTYYADSVKGRFTISRDNSKNTLYLQMNSLRAEDTAVYYCAKGFERDYADAFDIW | | (“HC”) amino acid sequence |
| | | GQGTTVTVSS | | |
| Ab 828 | 1656 | DIRMTQSPSSVSASVGDRVTITCRASQGISSWLAWYQQKPGKAPKLLIYAASSLQSG | ADI-43647 | Light chain variable region |
| | | VPSRFSGSGSGTDFTLTISSLQPEDFATYYCQQANSFPITFGQGTRLEIK | | (“LC”) amino acid sequence |
| Ab 829 | 1657 | EVQLVQSGAEVKKPGASVKVSCKASGYTFTSYDINWVRQATGQGLEWMGWMN | ADI-43648 | Heavy chain variable region |
| | | PNSGNTGYAQKFQGRVTMTRNTSISTAYMELSSLRSEDTAVYYCATRPAALDYWG | | (“HC”) amino acid sequence |
| | | QGTLVTVSS | | |
| Ab 829 | 1658 | QPVLIQPLSVSVALGQTARITCGGNNIGSKNVHWYQQKPGQAPVLIIYRDSNRPSG | ADI-43648 | Light chain variable region |
| | | IPERFSGSNSGNTATLTISRAQAGDEADYYCQVWDSSTWVFGGGTKLTVL | | (“LC”) amino acid sequence |
| Ab 830 | 1659 | QVQLVQSGGGLVKPGGSLRLSCAASGFTFRDFYMSWIRQAPGKGLEWVSNISPSS | ADI-36673 | Heavy chain variable region |
| | | TYTNYADSVKGRFTISRDNAKNSLYLQMNSLRAEDTAVYYCVKSEGYSSGWYDYW | | (“HC”) amino acid sequence |
| | | GQGTLVTVSS | | |
| Ab 830 | 1660 | QPVLTQPPSVSGAPGQRVTISCTGSSSNIGAGYDVNWYHQLPGAAPKLLIYTNSNR | ADI-36673 | Light chain variable region |
| | | PSGVPDRFSGSKSGTSASLAITGLQAEDEADYYCQSYDSSLSGYVFGTGTKLTVL | | (“LC”) amino acid sequence |
| Ab 831 | 1661 | EVQLVESGGGLVQPGGSLRLSCAASGFTFNRFAMSWVRQAPGKGLEWVSGISGS | ADI-36675 | Heavy chain variable region |
| | | GGSTLYADSVKGRFTISRDNSKNTLYLQINSLRVEDTAVYYCASRSSYDDVWNGYVD | | (“HC”) amino acid sequence |
| | | WDWGFDFYYYGMDVWGQGTTVTVSS | | |
| Ab 831 | 1662 | QAVVTQEPSMSAAPGQKVTISCSGGDSNIRNNYVFWYQQLPGTAPKLLIYDNTKR | ADI-36675 | Light chain variable region |
| | | PSGIPGRFSGSKSGASATLDITGLQTGDEADYYCGTWDSSLSALVFGGGTQLTVL | | (“LC”) amino acid sequence |
| Ab 832 | 1663 | EVQLLESGGGVVQPGRSLRLSCAASGFSFRNYDMHWVRQAPGKGLEWVAIISYDG | ADI-36676 | Heavy chain variable region |
| | | SNKYADSVKGRFTISRDTSKNTLYLQMNSLRVEDTAVYYCARADSSGYYKGSEYFQH | | (“HC”) amino acid sequence |
| | | WGQGTLVTVSS | | |
| Ab 832 | 1664 | SYELTQLPSVSVAPGQTARITCGGNNIGTKSVQWYQHKPGQAPVLVVYDDSDRPS | ADI-36676 | Light chain variable region |
| | | DIPERFSGSNSGNTATLTISRVEAGDEADYYCQVWDSSSDHYVFGTGTKLTVL | | (“LC”) amino acid sequence |
| Ab 833 | 1665 | EVQLVQSGGGLVQPGGSLRVSCAASGLTVSTNYMSWVRQLPGKGLEWVSVIYSG | ADI-36678 | Heavy chain variable region |
| | | GNTYYADSVKGRFTISRDNSKNIVYLEMNSLRIEDTAVYYCARAHLNNWFVSVTDT | | (“HC”) amino acid sequence |
| | | KDYYFDYWGQGTLVTVSS | | |
| Ab 833 | 1666 | SYELTQPPSVSVLPGQTASITCSGDKLGDKYASWYQQKPGQSPILVVFQDDKRPSGI | ADI-36678 | Light chain variable region |
| | | PERFSGSNSGNTATLTISGTQATDEADYYCQACDRNTGVFGTGTKLTVL | | (“LC”) amino acid sequence |
| Ab 834 | 1667 | EVQLLESGGGLVQPGGSLRLSCAASGFTFSPYSMNWVRQAPGKGLEWVSYISRSG | ADI-41552 | Heavy chain variable region |
| | | SFKYYADSVKGRFTISRDDAKNSLYLHMNSLRDDDTAVYYCVSYCSSATCHQRFDY | | (“HC”) amino acid sequence |
| | | WGQGTLVTVSS | | |
| Ab 834 | 1668 | EIVLTQSPATLSLSPGERATLSCRASQSVNSYLAWYQQKPGQAPRLLIYDASNRATGI | ADI-41552 | Light chain variable region |
| | | PARFSGSGSGTDFTLTISSLEPEDFAVYYCQERNSWPKLTFGGGTKVEIK | | (“LC”) amino acid sequence |
| Ab 835 | 1669 | EVQLVESETEVKKPGASVKVSCKASGYTFTKYGISWVRQAPGQGLEWMGWISAYN | ADI-41553 | Heavy chain variable region |
| | | GNTMYPHKLLGRVTMTTDTSTSTAYMELRSLRSDDTAVYYCARDQTYYDFWSGYY | | (“HC”) amino acid sequence |
| | | TYWGQGTLVTVSS | | |
| Ab 835 | 1670 | DIVMTQTPSTLSASVGDRVTITCRASQSISSWLAWYQQKPGKAPKLLIYKASSLESG | ADI-41553 | Light chain variable region |
| | | FTLTISSLQPDDSATYYCQQYNSYSRTFGQGTKVEIK | | (“LC”) amino acid sequence |
| Ab 836 | 1671 | EVQLVESGGGLVQPGGSLRLSCAASGFTFSSYPMNWVRQGPGKGLEWVSSISSSG | ADI-41554 | Heavy chain variable region |
| | | ASPYYADSVKGRFTISRDNSKNTLYLQMNSLRADDTAVYYCAREDYYYYYMDVWG | | (“HC”) amino acid sequence |
| | | KGTTVTVSS | | |
| Ab 836 | 1672 | ETTLTQSPSTLSASVGDRVTITCRASESISSWLAWYQQKPGKAPKLLIFKASTVQSGV | ADI-41554 | Light chain variable region |
| | | PSRFSGSGSGTEFTLTISSLQPDDFATYYCQQYNSYLLTFGGGTKVEIK | | (“LC”) amino acid sequence |
| Ab 837 | 1673 | EVQLVESGPGLVKPSQTLSLTCSVSGGSISSGIHYWSWIRQHPGKGLEWIGYIYYSGS | ADI-41555 | Heavy chain variable region |
| | | TYYNPSLESRITISVDTSKNQFSLKVSSVTAADTAVYYCARVNRASRMTTFGVANERS | | (“HC”) amino acid sequence |
| | | IYYFMDVWGKGTTVTVSS | | |
| Ab 837 | 1674 | ETTLTQSPATLSLSPGERATLSCRATQSVGNYLAWYQQKPGQAPRLLIHDASNRAT | ADI-41555 | Light chain variable region |
| | | GIPARFSGSGSGTDFTLTISSLEPEDFAVYYCQLRINWLFTFGPGTKVEIK | | (“LC”) amino acid sequence |
| Ab 838 | 1675 | EVQLLESGGGLVKPGGSLRLSCAASGFSFSSYSMHWVRQAPGKGLEWVSSISSSSTY | ADI-41556 | Heavy chain variable region |
| | | IYYADSVKGRFTISRDNAKTSLFLQMNSLRAEDTAVYYCARDPYSSGWYWDWGQG | | (“HC”) amino acid sequence |
| | | TTVTVSS | | |
| Ab 838 | 1676 | EIVMTQSPATLSVSPGERATLSCRASQSVSGNLAWYQQKPGQAPRLLIYGASTRAT | ADI-41556 | Light chain variable region |
| | | GIPARFSGSGSGTEFTLTISSLQSEDFAVYYCHQYNNRPATFGQGTKVDIK | | (“LC”) amino acid sequence |
| Ab 839 | 1677 | EVQLLESGPGLVKPSETLSLTCNVSGGSISSYYWSWIRQSPGKGLEWIGHIYDTGYT | ADI-41557 | Heavy chain variable region |
| | | NYNPSLKSRVTMSVDTSKNRFSLKLDSVTAADTAVYYCARGRGWRNLYNWFDPW | | (“HC”) amino acid sequence |
| | | GQGTLVTVSS | | |
| Ab 839 | 1678 | DIVMTQSPATLSVSPGERATLSCRTSQSFSSMLAWYQQKPGQAPRLLIYGASTRAT | ADI-41557 | Light chain variable region |
| | | GIPARFSGSGSATEFTLTISNLQSEDVAVYYCQQYNSWPLTFGGGTKVEIK | | (“LC”) amino acid sequence |
| Ab 840 | 1679 | EVQLLESGGGLVKPGGSLRLSCEVSGFPFSDYYVSWIRQAPGKGLEWLSYSSRGGIY | ADI-41558 | Heavy chain variable region |
| | | TNYADSVKGRFTISRDNDKNSLFLQMNSLRAEDTAVYYCARDRSDIWSGRVGFDY | | (“HC”) amino acid sequence |
| | | WGQGTLVTVSS | | |
| Ab 840 | 1680 | DIVMTQSPATLSLSPGERATLSCRASQSVSSSYLAWYQQKPGQAPRLLIYGASSRAT | ADI-41558 | Light chain variable region |
| | | GIPDRFSGSGSGTDFTLTISRLEPEDFAVYYCQQYNKSPPGYIFGPGTKVDIK | | (“LC”) amino acid sequence |
| Ab 841 | 1681 | QVQLVQSGPTLVKPTQTLTLTCSFSGFSLTNTGVGVGWIRQPPGKALEWLALIYWD | ADI-41561 | Heavy chain variable region |
| | | DDKRYRPSLKSRLTITKDTSKSQVVLTMTNMDPLDTATYYCAHRRSAYDPIYFDYW | | (“HC”) amino acid sequence |
| | | GQGALVTVSS | | |
| Ab 841 | 1682 | DIRVTQSPSSVSASVGDRVTITCRASRSINNWLAWYQQKPGKAPKLLIYAASSLQSG | ADI-41561 | Light chain variable region |
| | | VPSRFSGSGYGTDFTLTISSLQPEDFATYYCQQAHSFPSITFGQGTRLEIK | | (“LC”) amino acid sequence |
| Ab 842 | 1683 | QVQLVQSGAEVKKPGASVRVSCKTSGYAFSKYGISWVRQAPGQGLEWIGWISAYN | ADI-41562 | Heavy chain variable region |
| | | ENTHFSHKFLGRVTMTTDTSTGIAYMDLRSLKSDDTAVYYCARDWYSLGSDWYFG | | (“HC”) amino acid sequence |
| | | PMFDYWGQGTLVTVSS | | |
| Ab 842 | 1684 | EIVLTQSPDTLSVSPGERATLSCRASQSVTTNLAWYQQKPGHAPRLLIYGASTRATGI | ADI-41562 | Light chain variable region |
| | | PARFSGSGSGTEFTLTISSLQSEDFAIYYCQQYTNWPRTFGQGTKVEIK | | (“LC”) amino acid sequence |
| Ab 843 | 1685 | QVQLVESGPGLVKPSETLSLTCTVSDDSITNNFWTWIRQPPGKGLEWIGYIYYSGST | ADI-41563 | Heavy chain variable region |
| | | NYNPSLKSRITMSVDLSKNQFSLKLSSVTAADTAVYYCARLTSGGVDYWGQGTLVT | | (“HC”) amino acid sequence |
| | | VSS | | |
| Ab 843 | 1686 | QSVLTQPPSLSGAPGQRVTISCTGSSSNIGADYHVHWYQQLPGTAPKLLIYQNTNR | ADI-41563 | Light chain variable region |
| | | PSGVPDRFSASKSGTSVSLAITGLQAEDEADYYCQSYDSSLSAWVFGGGTKLTVL | | (“LC”) amino acid sequence |
| Ab 844 | 1687 | QVQLVQSGAEVKKPGSSVKVSCKAFGGTLRRYALSWVRQAPGQGLEWMGGIIPV | ADI-41564 | Heavy chain variable region |
| | | FGTRRYAQKFQGRITITADGSTSTASMEVSSLRFEDTAIYYCATVYFDFVSGPPPTYY | | (“HC”) amino acid sequence |
| | | YYYMDVWGKGTTVTVSS | | |
| Ab 844 | 1688 | DIVMTQSPGTLSLSPGERATLSCRASQSVSSSYLAWYQQKPGQAPRLLIYGASSRAT | ADI-41564 | Light chain variable region |
| | | GIPDRFSGSGSGTDFTLTISRLEPEDFAVYYCQQYDSSLRVLTFGGGTKVDIK | | (“LC”) amino acid sequence |
| Ab 845 | 1689 | QVQLQQWGAGLLKPSETLSLTCEVYGGSFSGYYWTWFRQPPGEGLEWIGEINHSG | ADI-41567 | Heavy chain variable region |
| | | GTNYNPSLKSRVTMSVDASINQFSLQLSSVTAADTSVYYCARGHYYNTNDFYGLFD | | (“HC”) amino acid sequence |
| | | YWGQGTLVTVSS | | |
| Ab 845 | 1690 | DIRLTQSPSFLSASVGDRVTITCRASQGISTYLAWYQQKPGKAPKLLLYAASTLHSGV | ADI-41567 | Light chain variable region |
| | | PSRFSGSGSGTEFTLTISSLQPEDFATYYCQQLNRYPPSTFGPGTKLEIK | | (“LC”) amino acid sequence |
| Ab 846 | 1691 | QVQLQQWGARLLKPSETLSLTCAVYGGSFSGYYWSWIRQSPGKGLEWIGEINHSG | ADI-41568 | Heavy chain variable region |
| | | STNYNPSLKSRVTISRDTSKKQFSLKVSSVTAADTAVYYCARDPPIRCNGDSCKSDQY | | (“HC”) amino acid sequence |
| | | RYGMDVWGQGTTVTVSS | | |
| Ab 846 | 1692 | QPGLTQPPSVSVSPGQTARITCSGDALPKQYAYWYQQKPGQAPVLVIHKDNERPS | ADI-41568 | Light chain variable region |
| | | GIPERFSGSSSGTTVTLTISGVQAEDEADYYCQSADTSGSYRLFGGGTKLTVL | | (“LC”) amino acid sequence |
| Ab 847 | 1693 | EVQLLESGAEVKKPGSSVKVSCKASGGTFSTYAISWVRQAPGQGLEWMGGIIPVLG | ADI-41569 | Heavy chain variable region |
| | | TTKYAQKFQDRVTITADESTSTAYMDLSGLRSDDTAVYYCARGVWGDCGRASCLF | | (“HC”) amino acid sequence |
| | | DWYFDLWGRGTLVTVSS | | |
| Ab 847 | 1694 | EIVMTQSPATLSVSPGERVTLSCSASQTVSSNLAWYQQKPGQAPRLLIYGASIRATDI | ADI-41569 | Light chain variable region |
| | | PARFSGSGSRTEFTLTISSLQSEDFAVYYCQQYNNRPPLTFGGGTKVEIK | | (“LC”) amino acid sequence |
| Ab 848 | 1695 | QVQLVQSGAEVKKPGSSVKVSCMASGGTFSNSAINWVRQAPGQGLEWMGGTIPI | ADI-41570 | Heavy chain variable region |
| | | FGAANYAQRFQARVTITADKSTSTAYMELTSLRSDDTAVYYCVRTPHRSSDHIWGS | | (“HC”) amino acid sequence |
| | | YRYFDSWGQGTLVTVSS | | |
| Ab 848 | 1696 | QSVVTQEPSVSAAPGQKITISCSGSTSNIGINYVSWYQQFPGTAPKLLIYDNDKRPSG | ADI-41570 | Light chain variable region |
| | | IPDRFSGSKSGTSATLGITGLQAGDEADYYCGTWDSSLSAGHIFGGGTKVTVL | | (“LC”) amino acid sequence |
| Ab 849 | 1697 | EVQLLESGGGLVKPGGSLRLSCEASGFPFNSYHMNWIRQSPGKGLEWVSYITGGSS | ADI-41571 | Heavy chain variable region |
| | | FSNYADSVKGRFTISRDNAKNSLYLQMNSLRAEDTAVYYCARTTLDCTSTSCHYRFD | | (“HC”) amino acid sequence |
| | | YWGQGTLVTVSS | | |
| Ab 849 | 1698 | QSVLTQPPSVSGAPGQRITISCNGSNSNIGAGYDVHWYQQLPGKAPKLLIYSNNNR | ADI-41571 | Light chain variable region |
| | | PSGVPDRFSGSKSGTSASLAITGLQGEDEADYYCQSHDTRLSGNVVFGGGTKLTVL | | (“LC”) amino acid sequence |
| Ab 850 | 1699 | QITLKESGPTLVKPTQTLTLTCTFSGFSLSTSGVGVAWIRQPPGKALEWLALIYWDD | ADI-41574 | Heavy chain variable region |
| | | DKRYSPSLKSRLTITKDTSKNQVVLTMTNMDPVDTATYYCAHSSVYTTPFDYWGQ | | (“HC”) amino acid sequence |
| | | GSLVTVSS | | |
| Ab 850 | 1700 | DIQLTQSPSTLSASVGDRVTITCRASQSISDWLAWYQQKPGKAPKLLIYKAFTLESGV | ADI-41574 | Light chain variable region |
| | | PSRFSGSGSGTEFTLTISSLQPDDFATYYCQQYTSYWTFGQGTKVEIK | | (“LC”) amino acid sequence |
| Ab 851 | 1701 | QVTLKESGPTLVKPTQTLTLSCSFSGFSLSAYAVGVGWIRQPPGKALEWLALIYWDD | ADI-41576 | Heavy chain variable region |
| | | DKRYSPSLETRLTITKDTSKNQVVLTMTKMDPVDTATYYCVYSYNGYYEYMDVWG | | (“HC”) amino acid sequence |
| | | NGTTVTVSS | | |
| Ab 851 | 1702 | DIVMTQSPATLSLSPGERATLSCRASQSVSNYLAWYQQKPGQAPRLLISGASNRAT | ADI-41576 | Light chain variable region |
| | | GIPDRFSGSGSGTDFTLTITTPEPEDFAVYYCQQRNAWPRTFGQGTKVEIK | | (“LC”) amino acid sequence |
| Ab 852 | 1703 | EVQLVESGGGVVQPGRSLRLSCAASGFTLSSYVMDWVRQAPGKGLEWVAVISYD | ADI-41578 | Heavy chain variable region |
| | | GSSKYYADSVKGRFTVSRDNSNNAMYLQMNSLRAEDTAVYYCARDPYYDILTGYSY | | (“HC”) amino acid sequence |
| | | FDYWGHGTTVTVSS | | |
| Ab 852 | 1704 | SYVLTQPPSVSGAPRQTATITCGGNNIGSKSVNWYQQKPGQAPVLVVYDDSARPS | ADI-41578 | Light chain variable region |
| | | GIPERFSGSNSGNTATLTVSSVEAGDEADYFCQVWDTSSAPYPWVFGGGTKLTVL | | (“LC”) amino acid sequence |
| Ab 853 | 1705 | QVQLVESGAEARKPGSSVKVSCKLSGGTFSTDPISWVRQAPGQGLEWMGRIIPLLG | ADI-41579 | Heavy chain variable region |
| | | IANYAQKFQGRVTIIADKSTSTVYMELRNLRFEDTAVYFCARRGDGYYGMDVWGQ | | (“HC”) amino acid sequence |
| | | GTTVTVSS | | |
| Ab 853 | 1706 | QSVLTQPASVSGSPGQSITISCTGTSNDIGGYDYVSWYQQHPGKAPKLMIYDVHNR | ADI-41579 | Light chain variable region |
| | | PSGVSNRFSGSKSGNTASLTISGLQAEDEADYYCSSFSDSGNLYVFGTGTKLTVL | | (“LC”) amino acid sequence |
| Ab 854 | 1707 | QVQLQQWGAGLLKPSETLSLTCAVYGGSFSGYYWSWIRQPPGKGLEWIGEMNHS | ADI-41580 | Heavy chain variable region |
| | | GGSNYNPSFKSRVTISVDTSKKYFSLNLSSVTAADTAIYYCARTPFYYESTGYYYYYYG | | (“HC”) amino acid sequence |
| | | MDVWGQGTTVTVSS | | |
| Ab 854 | 1708 | DIVMTQTPDSLAVSLGERATINCKSSQSVSHSSNNKNYLSWYQQKPGQPPKLLIYW | ADI-41580 | Light chain variable region |
| | | ASIRESEAPDRFTGSGSGTDFTLTISSLQAEDVAVYYCQQYYTAPITFGQGTRLEIK | | (“LC”) amino acid sequence |
| Ab 855 | 1709 | EVQLLESGSELKKPGASVKISCKTSGYTFTNYLMNWVRQAPGQGLEWMGWINTH | ADI-41581 | Heavy chain variable region |
| | | TGNPTYAQDFTGRFVFSLDTSVNTAYLQISSLKAEDTAIYYCARDGLEAFSGYNGVD | | (“HC”) amino acid sequence |
| | | YWGQGTLVTVSS | | |
| Ab 855 | 1710 | DIVMTQTPLSLPVTPGEPASISCRSSPSLLHSNGYNYLDWYLQKPGQSPQLLIYLGST | ADI-41581 | Light chain variable region |
| | | RASGVPDRFSGSGSGTDFTLRISRVEAEDVGVYYCMQALQIPLTFGQGTKLEIK | | (“LC”) amino acid sequence |
| Ab 856 | 1711 | EVQLVESGPGLVKPSQTLSLTCTVSGGPISSGVYYWSWIRQHPGKGLESIGYIYYSGS | ADI-41582 | Heavy chain variable region |
| | | THYNPSLKTRVTISLDTSKNQFSLKLSSVTAADTAVYYCARGCSGGSCYLYAFDIWG | | (“HC”) amino acid sequence |
| | | QGTTVTVSS | | |
| Ab 856 | 1712 | QPVLTQPPSVSVAPGQTARITCGGNNIGTKSVHWYQQKPGQAPLLVVYDDSDRPS | ADI-41582 | Light chain variable region |
| | | GIPERFSGSNSGNTATLTISRVEAGDEADFYCQVWDYATDHVVFGGGTKLTVL | | (“LC”) amino acid sequence |
| Ab 857 | 1713 | QVQLVQSGAEVKKPGSSVKVSCKASGGTFSRHTITWVRQAPGQGLEWMGRIAPIV | ADI-41583 | Heavy chain variable region |
| | | GFANYAQKFQGRVTITADKSTSTAYMELRSLRSEDTAVYYCARRSEDYYGLDVWG | | (“HC”) amino acid sequence |
| | | QGTTVTVSS | | |
| Ab 857 | 1714 | DIVMTQSPSSLSASVGDRVTITCQASQDISNYLNWYQQKPGKAPKLLIYEASNLETG | ADI-41583 | Light chain variable region |
| | | VPSRFSGSGSGTDFTFTISSLQPEDIATYYCQQYDNLFGGGTKLEIK | | (“LC”) amino acid sequence |
| Ab 858 | 1715 | QVQLVESGAEVKKPGASVKVSCKASGYTFTDYYIHWVRQAPGQGLEWVGRINPNS | ADI-41584 | Heavy chain variable region |
| | | GYINYAQKFQGRLTMTRDTSISTAYLELSSLRSDDTAVYYCTRLPLLEPLNFFDYWGQ | | (“HC”) amino acid sequence |
| | | GTLVTVSS | | |
| Ab 858 | 1716 | QSVVTQPPSVSGAPGQRVTISCTGSSSNIGAGYDVHWYQQLPGTAPKVLIYGNNN | ADI-41584 | Light chain variable region |
| | | RPSGVPDRFSGSKSGTSASLAITGLQAEDEADYYCQSFDSSLSSSYVFGTGTKLTVL | | (“LC”) amino acid sequence |
| Ab 859 | 1717 | EVQLLESGGGLVKPGGSLRLSCAASGFTFADYYMSWIRQAPGKGLEWVSYISGGSS | ADI-41585 | Heavy chain variable region |
| | | FTNYADSVKGRFTISRDNAKNSLYLQMNSLRADDTAVYYCARGISPALGGGEYFQD | | (“HC”) amino acid sequence |
| | | WGQGTLVTVSS | | |
| Ab 859 | 1718 | QPVLTQPPSVSGAPGQRVTISCTGSSSNIGAGYDVHWYQHLPGTAPKLLIYGNSNR | ADI-41585 | Light chain variable region |
| | | PSGVPDRFSGSKSSTSASLAITGLQAEDEADYYCQSYDSSLGGYVFGTGTKVTVL | | (“LC”) amino acid sequence |
| Ab 860 | 1719 | QVQLQQWGAGLLKPSETLSLTCAVYGGSFSGYSWSWIRQPPGKGLEWIGDIDHD | ADI-41586 | Heavy chain variable region |
| | | GSTYYNSSLKSRVIMSIDTSKNQFSLKLSSVTAADTAVYYCARVGGNSGYWGQGTL | | (“HC”) amino acid sequence |
| | | VTVSS | | |
| Ab 860 | 1720 | DIVMTQTPLSLPVTPGEPASISCRSSQSLLHSNGFNYLDWYLQKPGQSPQLLIYLGSN | ADI-41586 | Light chain variable region |
| | | RASGVPDRFSGSGSGTDFTLKISRVEAEDVGVYYCMQALQTLTFGPGTKVEIK | | (“LC”) amino acid sequence |
| Ab 861 | 1721 | QVQLVQSGAGLLKPSETLSLTCAVYGGSFSGYSWSWIRQPPGKGLEWIGEINYSVS | ADI-41587 | Heavy chain variable region |
| | | TSYNSSLKSRVSISVDTSKNQFSLKLTSVTAADTAVYYCARVGGAVADWGQGTLVT | | (“HC”) amino acid sequence |
| | | VSS | | |
| Ab 861 | 1722 | EIVLTQSPLSLPVTPGEPASISCRSSQRLLHSNGYNYLDWYLQKPGQSPQLLIYLGSN | ADI-41587 | Light chain variable region |
| | | RASGVPDRFSGSGSGTDFTLKISRVEAEDVGVYYCMQNLQTLTFGGGTKVDIK | | (“LC”) amino acid sequence |
| Ab 862 | 1723 | QVQLVESGPTLVKPTQTLTLTCTFSGFSLSTNGVGVAWIRQPPGKALEWLAIIYWD | ADI-41588 | Heavy chain variable region |
| | | DDKRYSPSLKSRLTITKDTSKNQVVLTVTDMDPVDTATYYCAHTIGVPAATRFDYW | | (“HC”) amino acid sequence |
| | | GQGTLVTVSS | | |
| Ab 862 | 1724 | SYELTQPPSVSVSPGQTASITCSGDKLGDKFACWYQQKPGQSPVLVIYQDNKRPSGI | ADI-41588 | Light chain variable region |
| | | PERFSGSNSGNTATLTISGTQAMDEADYYCQAWDSSTASYVFGTGTKLTVL | | (“LC”) amino acid sequence |
| Ab 863 | 1725 | EVQLLESGGGLVQPGGSLRLSCAASGFTFNFFALTWVRQAPGKGLEWVSAISGSGE | ADI-41589 | Heavy chain variable region |
| | | STYYADSVKGRFTISRDNSKNTLYLQMNSLRAEDTAVYYCAKFARSGDYASFFDYW | | (“HC”) amino acid sequence |
| | | GQGTLVTVSS | | |
| Ab 863 | 1726 | DIRVTQSPDSLAVSLGERATINCKSSQNVFYSSNNKNFLAWYQQKPGQPPKLLIYW | ADI-41589 | Light chain variable region |
| | | ASTRESGIPDRFSGSGSGTDFTLTISSLQAEDVAVYYCQQYYSTKFTFGPGTKVEIK | | (“LC”) amino acid sequence |
| Ab 864 | 1727 | EVQLVQSGGGLVKPGGSLRLSCTASGFTFSDHYMSWIRQAPGKGLEWISYISSTSSF | ADI-41590 | Heavy chain variable region |
| | | TNYANSVKGRFTISRDNAKNSLYLQMNSLRAEDTAVYYCARDRSILYSGYSLDYWG | | (“HC”) amino acid sequence |
| | | QGTLVTVSS | | |
| Ab 864 | 1728 | DIQMTQSPSSLSASVGDRVTISCRASQSILNYLNWYQHKPGKAPKLLIYAASSLQSG | ADI-41590 | Light chain variable region |
| | | VPSRFSGSGSGTDFTLTISGLQPEDFATYYCQQSDSTRTFGQGTKVEIK | | (“LC”) amino acid sequence |
| Ab 865 | 1729 | QVTLKESGGGLVKPGGSLRLSCAASGFTFSDYYMSWIRQAPGKGLEWVSYISSSSSY | ADI-41591 | Heavy chain variable region |
| | | TNYADSVKGRFTISRDNAKNSLYLQMNSLRAEDTAVYYCAREAVAAAGTDYFDYW | | (“HC”) amino acid sequence |
| | | GQGTLVTVSS | | |
| Ab 865 | 1730 | QSVLTQPPSVSGAPGQRVTISCTGSSSNIGAGYDVHWYQQPPRTAPKLLIYGNSNR | ADI-41591 | Light chain variable region |
| | | PSGVPDRFSGSKSGTSASLAITGLQAEDEADYYCQSYDSSLSGYVFGTGTKLTVL | | (“LC”) amino acid sequence |
| Ab 866 | 1731 | EVQLVESGSELKKPGASVKVSCKASGYTFRTYVMNWVRQAPGQGLEWMGWINT | ADI-41592 | Heavy chain variable region |
| | | NTGNPTYAQGFTGRFVFSLDTSVSTAYLQISSLKAEDTAVYYCARESIDDYDSSGYGR | | (“HC”) amino acid sequence |
| | | TFDYWGQGTLVTVSS | | |
| Ab 866 | 1732 | SYELTQPPSVSVSPGQTASIPCSGDKVGKTYVYWYQQTPGQSPGLVIYQDTKRPSGI | ADI-41592 | Light chain variable region |
| | | PERFSGSSSGNTATLTISGTQTMDEADYYCQAWDTSTASYVFGTGTKLTVL | | (“LC”) amino acid sequence |
| Ab 867 | 1733 | QVQLVQSGVEVKKPGESLKISCKGSGYSFTNYWIAWVRQMPGKGLEWMGIIYPG | ADI-41593 | Heavy chain variable region |
| | | DSDTRYSPSFQGQVTISADKSISTAYVQWSSLKASDTAIYYCARGDILTNSGPDAFDI | | (“HC”) amino acid sequence |
| | | WGQGTMVTVSS | | |
| Ab 867 | 1734 | DIQMTQSPSSFSASTGDRVTITCRASQAISSYLAWFQQKPGKAPKLLIYAASTLQSG | ADI-41593 | Light chain variable region |
| | | VPSRFSGSGSGTDFTLTISCLQSEDFATYYCQQYYSYPLTFGGGTKVEIK | | (“LC”) amino acid sequence |
| Ab 868 | 1735 | EVQLVESGGGLVKPGGSLRLSCAASGFSFSSYYMNWVRQAPGKGLEWVSSISPSSS | ADI-41594 | Heavy chain variable region |
| | | YTNYADSVKGRFTISRDNAKDSLYLQMNSLRAEDTAVYYCARDGLLGITIFGVVQDY | | (“HC”) amino acid sequence |
| | | WGQGTLVTVSS | | |
| Ab 868 | 1736 | QSVVTQPPSVSGAPGQRVTISCTGSSSNIGAGYDVHWYQQLPGTAPKLLIYGNTNR | ADI-41594 | Light chain variable region |
| | | PSGVPDRFSASKSGTSASLAITGLQAEDEADYYCQSYDSSLSVVFGGGTKLTVL | | (“LC”) amino acid sequence |
| Ab 869 | 1737 | QVQLVQSGGGVVQPGGSLRLSCAASGFTFSDYGMHWVRQAPGKGLEWVAVISD | ADI-41595 | Heavy chain variable region |
| | | GGSNQYSADSVRGRFTISRDNSKNTLYLQMNSLRPEDTAVYYCAKARIAARAIFDY | | (“HC”) amino acid sequence |
| | | WGQGTLVTVSS | | |
| Ab 869 | 1738 | DIQLTQSPSSLSASVGERITITCQASRDVRIYLNWYQHKPGKAPKLLIYDASNLETGV | ADI-41595 | Light chain variable region |
| | | PSRYSGSGSGTDFTFTISSLQPEDIATYFCQQYDLLPPTFGVGTKVEIK | | (“LC”) amino acid sequence |
| Ab 870 | 1739 | QVQLQQWGAGLLKPSETLSLTCAVYGDSFSGYFWTWIRQPPGKGLEWIGEINLSG | ADI-41596 | Heavy chain variable region |
| | | STNYNPSLKSRVTILVDTSKNQFSLKLSSVTAADTAVYYCARGLHVSDDQDSSGYYF | | (“HC”) amino acid sequence |
| | | HPGSFDYWGQGTLVTVSS | | |
| Ab 870 | 1740 | DIRMTQSPDSLAVSLGERATINCKSSQSVLYSSNNKNYLAWYQQKPGQPPKLLINW | ADI-41596 | Light chain variable region |
| | | ASTRESGVPDRFSGSGSGTDFTLAISSLQAEDVAVYYCQQYYSTPLTFGGGTKVEIK | | (“LC”) amino acid sequence |
| Ab 871 | 1741 | QVQLQESGPGLVKPSETLSLTCTVSGASVSSNNYYWSWIRQPPGKGLEWIGYIYYS | ADI-41597 | Heavy chain variable region |
| | | GSTNYNASLKSRVTISVDTSKNQFSLKLSSVTAADTALYYCAGEHFGVASPFEAPFD | | (“HC”) amino acid sequence |
| | | YWGQGTMVTVSS | | |
| Ab 871 | 1742 | SSELSQPPSVSVAPGKTARITCGGNNIGIKSVHWYQQKPGQAPVLVIYSDSDRPSGI | ADI-41597 | Light chain variable region |
| | | PERFSGSNSGNTATLTITRVEAGDEADYYCQVWDSSSDHFVFGIGTKVTVL | | (“LC”) amino acid sequence |
| Ab 872 | 1743 | EVQLVESGPGLVKPSETLSLTCTVSGGSITPYYWSWIRQPPGKGLEWIGNISYSGSTT | ADI-41598 | Heavy chain variable region |
| | | YNPSLKSRVTISVDRSKDQFSLRLRSVTAADTAVYYCARVVTLVLGVSLNDAFDIWG | | (“HC”) amino acid sequence |
| | | QGTMVTVSS | | |
| Ab 872 | 1744 | DIQMTQSPSSLSASVGDRVTITCRASQSISRYLNWYQHKPGKAPILLIYAATTLESGV | ADI-41598 | Light chain variable region |
| | | PPRFSGSGSGTDFSLTISSLQPEDFATYYCQQSYSVPLTFGGGTKLEIK | | (“LC”) amino acid sequence |
| Ab 873 | 1745 | EVQLLESGGGLVQPGGSLRLSCAASGFIFSNYEMNWVRQAPGKGLEWISHITPTGN | ADI-41599 | Heavy chain variable region |
| | | SIYYADSVKGRFTISRDNAKNAQYLQMHSLRPDDTAIYYCARGEDPIAATGGFDSW | | (“HC”) amino acid sequence |
| | | GQGTLVTVSS | | |
| Ab 873 | 1746 | EIVLTQSPSSLSASVGDRVTIPRRSSQNVDKFLHWYQQRPGKAPKLLIYAAFSLQSGV | ADI-41599 | Light chain variable region |
| | | PSRFSGSGSGTDFTLTISSLQPEDFATYYCQQSYSTPFTFGQGTKVEIK | | (“LC”) amino acid sequence |
| Ab 874 | 1747 | EVQLLESGGNMVQPGKSLRLSCAASGFTFSNYGMHWVRQAPGKGLEWVAVISKD | ADI-41600 | Heavy chain variable region |
| | | GNNEHYADSVRARFTVSRDNSKNTLFLQMNSLRPEDTAVYYCAIGGLSGSYFGEYF | | (“HC”) amino acid sequence |
| | | QHWGRGTLVTVSS | | |
| Ab 874 | 1748 | DIQMTQSPSSMSASLGDRVTITCRASQGISTWLAWYQQKPGEAPKLLIYAAFGLQS | ADI-41600 | Light chain variable region |
| | | GVPSRFSGSGSGTDFTLTINNLQPEDFATYYCQQAISFPFTFGGGTKVEIK | | (“LC”) amino acid sequence |
| Ab 875 | 1749 | EVQLLESGGGLVKPGGSLRLSCAGSGFRFSDYYMTWIRQAPGKGLEWVSYISSSSTY | ADI-41601 | Heavy chain variable region |
| | | TYYTDSVKGRFTVSRDNAKNSLYLQMNTLRAEDTAIYYCAISNRYDSRTFYYDYWG | | (“HC”) amino acid sequence |
| | | QGTLVTVSS | | |
| Ab 875 | 1750 | QSVLTQPPSVSGAPGQRVIISCTGSSSNIGAGYDVHWYQQFPGTAPKLLIYGNNNR | ADI-41601 | Light chain variable region |
| | | PSGVPERFSGSKSGTSASLAITGLQADDEADYYCQSYDSLSEVVFGGGTKVTVL | | (“LC”) amino acid sequence |
| Ab 876 | 1751 | EVQLQESGPGLVKPSETLSLTCTVSGGSLSGYYWSWIRQPPGKGLEWIGYIYHSGST | ADI-41602 | Heavy chain variable region |
| | | NYNPSLESRVTISVDTSKNQFSLKVNAVTAADTAVYYCAKVERLLRFDPWGQGTLV | | (“HC”) amino acid sequence |
| | | TVSS | | |
| Ab 876 | 1752 | QSVLIQPASVSGSPGQSITISCIGSSSDVGGYNYVSWYQHYPGKAPKLMIYDVSNRP | ADI-41602 | Light chain variable region |
| | | SGVSNRFSGSKSGNTASLTISGLQAEDEADYYCSSYTSSTSYVFGTGTKVTVL | | (“LC”) amino acid sequence |
| Ab 877 | 1753 | EVQLVESGGGLVKPGRSLRLSCTTSGFTFGDYAMSWFRQAPGKGLEWVGFIRSKPY | ADI-41603 | Heavy chain variable region |
| | | GGATAYAASVRGRFTISNDDSKSIAYLQMESLKIEDTAVYYCARDYDDFFFYDYWG | | (“HC”) amino acid sequence |
| | | QGTLVTVSS | | |
| Ab 877 | 1754 | DIRMTQSPATLSVSPGERATLSCRASENIYSNLAWYQQKPGQAPRLLIYGASTRATG | ADI-41603 | Light chain variable region |
| | | LPARFSGSGSGTEFTLTISSLQSEDFAVYYCQQYNNWPAFGGGTKVEIK | | (“LC”) amino acid sequence |
| Ab 878 | 1755 | QVTLKESGAEVKKPGASVKVSCKASGYTFTGYYMHWVRQAPGQGLEWMGRINP | ADI-41604 | Heavy chain variable region |
| | | NSGGTNYAQKFQGRVTMTRDTSISTAYMELSRLRSDDTAVYYCAREASRFGGFDY | | (“HC”) amino acid sequence |
| | | WGQGTLVTVSS | | |
| Ab 878 | 1756 | DIVLTQSPSSLSASVGDRVTITCQASQDISNYLNWYQQKPGKAPKLLIYDASNLETG | ADI-41604 | Light chain variable region |
| | | VPSRFSGSGSGTDFTFTISSLQPEDIATYYCQQYDNLLGYTFGQGTKVEIK | | (“LC”) amino acid sequence |
| Ab 879 | 1757 | QVQLVESGPGLVKPSQTLSLTCSVSGGSISSDDHYWSWIRQHPGKGLEWIGYIYYS | ADI-41605 | Heavy chain variable region |
| | | GYTNYNPSLKSRVTISVDTSKNQFSLRLSSVTAADTAVYYCARETDITIFGVVPVGYF | | (“HC”) amino acid sequence |
| | | DYWGQGTLVTVSS | | |
| Ab 879 | 1758 | DIQVTQSPDSLAVSLGERATINCKSSQSILSSTNNKNFLAWYQQKPGQPPKLLLHW | ADI-41605 | Light chain variable region |
| | | ASTREFGVPDRFSGSGSGTEFTLTISSLQAEDVAVYYCQQYYTTPYTFGQGTKVEIK | | (“LC”) amino acid sequence |
| Ab 880 | 1759 | EVQLLESGPGLVKPSETLSLTCTVSGGSVSSGGYYYTWIRQPPGKGLEWIGYAFYSG | ADI-41606 | Heavy chain variable region |
| | | DTNYNPSLKSRVTISVDTSKNQFSLKLTSVTAADTAVYYCASTYTFGASGFDFWGQG | | (“HC”) amino acid sequence |
| | | TLVTVSS | | |
| Ab 880 | 1760 | DIVMTQSPSFMSASVGDRVTITCRASQGISNWLLWYQQKPGKAPKLLIYAASSLQS | ADI-41606 | Light chain variable region |
| | | GVPSRFSGSRSGTDFTLTISSLQPEDFAIYYCQQANSFPLTFGQGTRLEIK | | (“LC”) amino acid sequence |
| Ab 881 | 1761 | EVQLVESGPGLVKPSQTLSLTCTVSGGSINIGGYYWSWIRQHPEKGLEWIGYIYYSG | ADI-41607 | Heavy chain variable region |
| | | TTYYNPSLESRVTISIDTSKNQFSLNLSSVTAADTAVYYCASVDQIGATRFDYWGQG | | (“HC”) amino acid sequence |
| | | TLVTVSS | | |
| Ab 881 | 1762 | QPVLTQPRSVSGSPGQSVTLSCTGTSSDVGTYNYVSWYQHHPGKAPKLIIYDVNKR | ADI-41607 | Light chain variable region |
| | | PSGVPDRFSGSKSGNTASLTISGLQAEDEADYYCCSYAGSYTLNYVFGTGTKLTVL | | (“LC”) amino acid sequence |
| Ab 882 | 1763 | QVQLVQSGDEVKKPGESLKISCKGSEHTFTNYWIAWVRQMPGKGLECMGVIWPD | ADI-41608 | Heavy chain variable region |
| | | DSDTKYSPSFQGQVTISADKSINTAYLHLSSLRASDTAMYYCATSKFRTGFDFWGQG | | (“HC”) amino acid sequence |
| | | TLVTVSS | | |
| Ab 882 | 1764 | NFMLTQPHSVSESPGKTVIISCTRSSGNIASNYVQWYQQRPGSSPTTVVYEDNQRP | ADI-41608 | Light chain variable region |
| | | SGVPDRFSGSIDSSSNSASLTISGLKTEDEADYYCQSYDSSNPWVFGGGTKLTVL | | (“LC”) amino acid sequence |
| Ab 883 | 1765 | QVQLVESGAEVKKPGASVKVSCKASGYSFTSYYMHWVRQAPGQGLEWMGVISTN | ADI-41609 | Heavy chain variable region |
| | | GGTASYSQNFRGRVILTRDTSTSTAYMELSSLTSEDTAVYYCVREGYCNGGSCSYFD | | (“HC”) amino acid sequence |
| | | SWGQGTLVTVSS | | |
| Ab 883 | 1766 | QSVLTQPPSVSGAPGQRVSISCTGSSSNIGAGYDVHWYQQLPGTAPKVLIYGNNYR | ADI-41609 | Light chain variable region |
| | | PSGVPDRFSGSKSGTSASLAITGLQTEDEADYYCQSYDSRLSVVFGGGTKLTVL | | (“LC”) amino acid sequence |
| Ab 884 | 1767 | EVQLLESGGGVVQPGRSLRLSCAASELSFRNYGMHWVRQAPGKGLEWVAVISYD | ADI-41610 | Heavy chain variable region |
| | | GNDKYYADSVKGRFTISRDNSKKTLYLQMDSLRAEDTAVYYCAKEGAYCGGDCFSS | | (“HC”) amino acid sequence |
| | | WGQGTLVTVSS | | |
| Ab 884 | 1768 | GIQLTQSPSSLSASVGDRVTITCRASQSSSSYLNWYQQKPGKAPKLLIYAASSLQSGV | ADI-41610 | Light chain variable region |
| | | PSRFSGSGSGTDFTLTISSLQPEDFATYYCQQSYSFGGGTKVEIK | | (“LC”) amino acid sequence |
| Ab 885 | 1769 | EVQLVESGGGLVKPGGSLRLSCAASGFTFSDYSMNWVRQAPGKGLEWVSSTSSGS | ADI-41611 | Heavy chain variable region |
| | | TYIYYADSVKGRFTISRDNGKNSLYLQMNSLRAEDTAVYYCARAFRLGYDALDIWG | | (“HC”) amino acid sequence |
| | | QGTMVTVSS | | |
| Ab 885 | 1770 | DIRMTQSPSSLSASVGDRVTIICRASQSISNYLNWYQQKPGKAPKLLIYVASNLQSG | ADI-41611 | Light chain variable region |
| | | VPSRFSGSGSGTDFTLTISSLQPEDFATYYCQQTYSPPPTFGGGTKLEIK | | (“LC”) amino acid sequence |
| Ab 886 | 1771 | EVQLQESGPGLVKPSGTLSLTCAVAGGFISSGNWWSWIRQPPGKGLEWIGEVYHS | ADI-41626 | Heavy chain variable region |
| | | GRTSYNPSLKSRVTISVDNSKNQFSLKMSSVTAADTAVYYCARVESYSSSGYYIAYD | | (“HC”) amino acid sequence |
| | | NWGQGNLVTVSS | | |
| Ab 886 | 1772 | DIVLTQSPSSLSASVGDRVTITCRASQSISRYLSWYQQKPGKAPKLLIYAAFSLQTGVP | ADI-41626 | Light chain variable region |
| | | SRFSGSGSGTDFTLTISSFQTEDSATYYCQQSYSAPVTFGGGTKVEIK | | (“LC”) amino acid sequence |
| Ab 887 | 1773 | QVQLQQWGPGLVKPSETLSLSCAVSGGSLRGHFWSWIRQPPGKGLEWIGEINHG | ADI-41644 | Heavy chain variable region |
| | | GRTNFNPSLKSRLTISEDSSKNQFSLKLSSVTAADTAVYYCARRWGYDSSGYYFFDY | | (“HC”) amino acid sequence |
| | | WGQGTLVTVSS | | |
| Ab 887 | 1774 | EIQMTQSPATLSVSPGERATLSCRASQTLGFNLAWYQQKPGQSPRLLIYGASTRAT | ADI-41644 | Light chain variable region |
| | | GIPARFSGSGAGTEFTLTISSLQSEDFAVYFCQQYSNYYTFGQGTKVEIK | | (“LC”) amino acid sequence |
| Ab 888 | 1775 | EVQLVQSGAEVKKPGSSVKVSCKASGGTFSRNAISWVRQAPGQGLEWMGGIIPIF | ADI-41660 | Heavy chain variable region |
| | | GAANYPQKFQGRVTITADKSTSTAYMELSSLRSEDTALYYCARTMGEMTTTPVSIYY | | (“HC”) amino acid sequence |
| | | YGMDVWGQGTTVTVSS | | |
| Ab 888 | 1776 | QSVLTQPPSVSAAPGQKVTISCSGSSSNIGINYVSWYQQLPGTAPKLLIYDNNKRPS | ADI-41660 | Light chain variable region |
| | | GIPDRFSGSKSGTSATLGITGLQTGDEADYYCGTWDSSLSAGYVFGSGTKLTVL | | (“LC”) amino acid sequence |
| Ab 889 | 1777 | QVQLVQSGAEVKKAGESLKISCKGPRHSFTSYWIGWVRQMPGKGLEWMASIYPG | ADI-41662 | Heavy chain variable region |
| | | DSDSRYSPSFEGQVTISADKSIDTAFLQWSSLKASDTAMYFCARYVGAVPGGNWYF | | (“HC”) amino acid sequence |
| | | DLWGRGTLVTVSS | | |
| Ab 889 | 1778 | SYELIQLPSVSVSPGQTARITCSGDALPKKYAYWYQQKSGQAPVLVIYDDNKRPSGI | ADI-41662 | Light chain variable region |
| | | PARFSGSSSGTMATLTISGAQVEDEGDYYCYSTDSTGDHRGVFGGGTKLTVL | | (“LC”) amino acid sequence |
| Ab 890 | 1779 | EVQLVQSGDEVKKPGASVKVSCKASGYPFSTYGISWVRQAPGQGLEWMGWIGVY | ADI-41664 | Heavy chain variable region |
| | | TGGTNYAQKFQGRVILTIDTSTSTAYMELRSLRSDDTAVYYCARGTGSYMTATYFD | | (“HC”) amino acid sequence |
| | | YWGQGTLVTVSS | | |
| Ab 890 | 1780 | SYELTQPPSVSVAPGQTARITCGGNNIGSKAVHWYQQKPGQAPVLVVYDDYDRPS | ADI-41664 | Light chain variable region |
| | | GIPERFSGSNSGNTATLTISRVEAGDEADYYCQVWDSSSDYVFGTGTKLTVL | | (“LC”) amino acid sequence |
| Ab 891 | 1781 | QVTLKESGPALVKPTQTLTLTCTFSGFSLSTSRMCVSWIRQPPGKALEWLARIDWD | ADI-41677 | Heavy chain variable region |
| | | GDIYYSTSLRTRLTISKDTSKNQVVLTMTNMDPVDTATYYCARTSIYATGGYYLYYSD | | (“HC”) amino acid sequence |
| | | YWGQGTLVTVSS | | |
| Ab 891 | 1782 | EIVMTQSPSSLSASVGDRVTITCRASQSIASYVNWFQQKPGKAPKLLIYAASNVHSG | ADI-41677 | Light chain variable region |
| | | VPSRFSGSGSGTGFTLTISSLQPEDSAIYYCQQSYTTPWTFGQGTKLEIK | | (“LC”) amino acid sequence |
| Ab 892 | 1783 | EVQLVESGGGVVQPGGSLRLSCAASGFTFRTYGMHWVRQAPGKGLEWVAVISYD | ADI-41678 | Heavy chain variable region |
| | | GSNKYYADSLMGRFTISRDNSKNTLYLQMNSLRAEDTAVYYCAKCFVPGSGGWYE | | (“HC”) amino acid sequence |
| | | YYFDYWGQGTLVTVSS | | |
| Ab 892 | 1784 | QSVLTQPPSASGSPGQSVTISCTGTSSDVGGYNYVSWYQQHPGKAPKLMIYEVSKR | ADI-41678 | Light chain variable region |
| | | PSGVPDRFSGSKSGNTASLTVSGLQAEDEADYYCSSYAGINNSVLFGGGTKLTVL | | (“LC”) amino acid sequence |
| Ab 893 | 1785 | QVQLVQSGAEVKKPGESLRISCKGSGYSFSSHWIGWVRQKPGKGLEWMGIIYPGD | ADI-41690 | Heavy chain variable region |
| | | SDTRYSPSFQGHVTISADKSISTAYLRWSSLKASDTAIYYCAKRMVGDYYGMNLWG | | (“HC”) amino acid sequence |
| | | QGTTVTVSS | | |
| Ab 893 | 1786 | EIVMTQSPSSLSASVGDRVTITCQASQDISNRLNWYQQKPGKAPKLLIYDASNLETG | ADI-41690 | Light chain variable region |
| | | VPSRFSGSGSGTDFTFTISSLQPEDIATYFCQQYDYLLWFTFGPGTKVDIK | | (“LC”) amino acid sequence |
| Ab 894 | 1787 | QVQLVQSGAEVKKPGESLKISCQASGYSFTTYWIGWVRQTPGKGLEWMGIIYPGD | ADI-41701 | Heavy chain variable region |
| | | SDTRYTPSFQGQVTISADKSISTAYLHWSSLKASDTAMYYCARLSGGYTFGFDYWGL | | (“HC”) amino acid sequence |
| | | GTLVTVSS | | |
| Ab 894 | 1788 | NFMLTQPHSVSESPGKTVTISCTRSSGNIARYYVQWYQQRPGRAPTTVIYEDDQRP | ADI-41701 | Light chain variable region |
| | | SGVPDRFSGSIDRSSNSASLTISGLKTEDEADYYCQSYDASNYVFATGTKVTVL | | (“LC”) amino acid sequence |
| Ab 895 | 1789 | EVQLLESGSGLVKPLQTLSLTCAVSGGSISSGGYSWSWIRQPPGKGLEWIGYIYPSGS | ADI-41703 | Heavy chain variable region |
| | | TYYNPSLKSRVTMSIDRSKNQFSLRLTSVTAADTAVYYCARGDGNDFWSADSSHAF | | (“HC”) amino acid sequence |
| | | AIWGQGTMVTVSS | | |
| Ab 895 | 1790 | EIVMTQSPGILSLSPGERATLSCRASQIVGNSYLAWYQQKPGQAPRLLIYGASSRAT | ADI-41703 | Light chain variable region |
| | | GIPERFSGSGSGTDFTLTISRLEPEDFAVYHCQQYGSSPWTFGQGTKVEIK | | (“LC”) amino acid sequence |
| Ab 896 | 1791 | QVQLVESGGGVVQPGRSLRLSCAASGFTFSSYGMHWVRQAPGKGLEWVSVIWFD | ADI-41720 | Heavy chain variable region |
| | | GSKKYYEDSVKGRFTISRDNSKNTLYLEMNSLRAEDTAVYYCAREAPVRLGELSLYGY | | (“HC”) amino acid sequence |
| | | FDYWGQGTLVTVSS | | |
| Ab 896 | 1792 | DIQMTQSPSTLSASVGDRVTITCRASQSFSSWLAWYQQKPGKAPKLLIYDASTLESG | ADI-41720 | Light chain variable region |
| | | VPSRFSGSGSGTEFTLTISSLQPDDFATYYCQQYNSYSWTFGQGTKLEIK | | (“LC”) amino acid sequence |
| Ab 897 | 1793 | QVQLQESGPGLVKPSQTLSLTCTVSGGSMISGDFYWSWIRQPPGKGLEWIGYIYYS | ADI-41737 | Heavy chain variable region |
| | | GTTYYSPSLKSRVSMSIDTSKSQFSLKLSSVTAADTAVYYCARKYSYGEKAYHYWGQ | | (“HC”) amino acid sequence |
| | | GTLVTVSS | | |
| Ab 897 | 1794 | EIVLTQSPGTLSLSPGERATLSCRASQTVGNNYLAWYQQKPGQAPRLLIYGASSRAT | ADI-41737 | Light chain variable region |
| | | GIPDRFSGSGSGTDFTLTISRLESEDFAVYHCHQYGTSPQTFGQGTKVEIK | | (“LC”) amino acid sequence |
| Ab 898 | 1795 | EVQLVESGSGLVKPSQTLSLTCSVSGGSISSGGYSWSWIRQPPGKGLEWIGFIYNTG | ADI-41743 | Heavy chain variable region |
| | | STYSNPSLKSRLTLSVDRSNNRFSLKLNSVTAADTGVYFCARSGNVRQCDATGHCST | | (“HC”) amino acid sequence |
| | | NYYFEYWGLGTLVTVSS | | |
| Ab 898 | 1796 | EIVMTQSPATLSVSPGERATLSCRASQSVSSNLAWYQQKPGQAPRLLIYGASTRAT | ADI-41743 | Light chain variable region |
| | | GIPARFSGSGSGTEFTLTISSLQSEDFAVYYCQQHDDWPPLTFGGGTKVEIK | | (“LC”) amino acid sequence |
| Ab 899 | 1797 | EVQLLESGGGVVQPGRSLRLSCAASGLSFNSFGMHWVRQAPGKGLEWVAVIAYD | ADI-41756 | Heavy chain variable region |
| | | GSNKYYADSVKGRFSISRDNSKNTLYLQMDSLRAEDTAVYYCAKAEAPNFSWSGYL | | (“HC”) amino acid sequence |
| | | SAFDIWGQGTTVTVSS | | |
| Ab 899 | 1798 | QPVLIQPASVSGSPGQSVIVSCTGTSDDVGDYNYVSWYQQHPGKAPKLLIFEVSD | ADI-41756 | Light chain variable region |
| | | RPSGVSTRFSGSKSGNTASLTISGLQTEDEADYYCSSYTSRNLYVFGTGTKVTVL | | (“LC”) amino acid sequence |
| Ab 900 | 1799 | EVQLVESGGGLVQPGRSLRLSCAASGFTFGDYAMHWVRQAPGKGLEWVSGITW | ADI-41768 | Heavy chain variable region |
| | | NSGRVVYADSVKGRFTISRDNAKNSLYLQINSLRAEDTALYYCVKGSCNGGICYSAD | | (“HC”) amino acid sequence |
| | | YWGQGTLVTVSS | | |
| Ab 900 | 1800 | NFMLTQPHSVSESPGKTVTISCTRSSGSIARNFVHWYQQRPGSSPTTVIYEDNQRPS | ADI-41768 | Light chain variable region |
| | | GVPGRFSGSIDSSSNSASLTISGLRSEDEADYYCQSYDSDNWVFGGGTKLTVL | | (“LC”) amino acid sequence |
| Ab 901 | 1801 | EVQLLESGGGLVEPGTSLRLSCEASGFTFSDYYMSWIRQAPGKGPEWVADISSRGV | ADI-41772 | Heavy chain variable region |
| | | VTYYADSVKGRFTISRDNAKNSLYLQLNSLGAEDTAVYYCARLREVTYIMPTIDYFDY | | (“HC”) amino acid sequence |
| | | WGQGTLVTVSS | | |
| Ab 901 | 1802 | SYELTQPPSVSVSPGQTARITCSGDAFVKKYAYWYHQKSGQAPVVVIYEDTKRPSGI | ADI-41772 | Light chain variable region |
| | | PERFSGSSSGTTATLTISGAQVEDEGDYYCYSRDFSGDHGVFGGGTKLTVL | | (“LC”) amino acid sequence |
| Ab 902 | 1803 | QVQLVESGGGQGQPGRSLRLSCAASGFTFDDYAMHWVRQVPGKGLEWVSGIN | ADI-41778 | Heavy chain variable region |
| | | WNSGYIGYADSVKGRFTISRDNAKNSLYLQMNSLRAEDTALYYCAKANNPIDSSGY | | (“HC”) amino acid sequence |
| | | NRGFDTWGQGTLVTVSS | | |
| Ab 902 | 1804 | QSALTQPRSVSGSPGQSVTISCTGTSSDVGGYNYVSWYQQHPGKAPKLMIYDVNK | ADI-41778 | Light chain variable region |
| | | RPSGVPDRFSGSKSDNTASLTISGLQAEDESDYFCCSYAGTYTWVFGGGTKVTVL | | (“LC”) amino acid sequence |
| Ab 903 | 1805 | QVQLVQSGAEVRKPGASVKVSCKAFGYTFTNFAISWVRQAPGQGLEWMGWIGP | ADI-41781 | Heavy chain variable region |
| | | YNGDTDYEQKFQGRVTMTADTSSSTVFMELRSLRFDDTAVYYCARGKGSTIPLGYYI | | (“HC”) amino acid sequence |
| | | GMDVWGQGTTVTVSS | | |
| Ab 903 | 1806 | ETTLTQSPSSLSASVGDRVTMTCRASQGISNYLAWYQQKPGKPPKLLIYLASSLQSG | ADI-41781 | Light chain variable region |
| | | VPSRFSGSGSGTDFTLTISSLQPEDVATYYCQKYNSAPLTFGGGTKLEIK | | (“LC”) amino acid sequence |
| Ab 904 | 1807 | QVQLVQSGDEVKKPGASVKVSCKSSGYTFTHFGVSWVRQAPGQGLEWMGWISG | ADI-41783 | Heavy chain variable region |
| | | YNGNTNYAQKLQGRVTMTTDTSTTTAYMELTSLRSDDTAVYYCARDSPAGTVTLD | | (“HC”) amino acid sequence |
| | | FWGQGTTVTVSS | | |
| Ab 904 | 1808 | DIVMTQSPLSLPVTLGQPASISCRSSQSLVYSDGNTYLNWFQQRPGQSPRRLIYKVS | ADI-41783 | Light chain variable region |
| | | NRDSGVPDRFSGSGSGTDFTLKISRVEAEDVGVYYCMHGTHWPPEYTFGQGTKVE | | (“LC”) amino acid sequence |
| | | IK | | |
| Ab 905 | 1809 | EVQLLESGGGVVQPGRSLRLSCAASGFTFSSSGMHWVRQAPGKGLEWVAIISSDG | ADI-41787 | Heavy chain variable region |
| | | SKHYYADSVKGRFTISRDNSKNTLYLEMNSLRAEDSAVYYCAREGVWSGFFVDTGT | | (“HC”) amino acid sequence |
| | | DFRHHGMDVWGQGTTVTVSS | | |
| Ab 905 | 1810 | SYELTQPPSVSVSPGQTARITCSGDALPKKFAFWYQQKSGQAPLLVIHEDNKRPSGI | ADI-41787 | Light chain variable region |
| | | PERFSGSSSGTLATLTISGAQVEDEADYYCYSIDTSANLGVFGGGTKLTVL | | (“LC”) amino acid sequence |
| Ab 906 | 1811 | QVQLVQSGAEVKKPGASVKVSCQASGYTLTTYDINWVRQAPGQGLEWMGWMN | ADI-41788 | Heavy chain variable region |
| | | ANSGNTGYAQKFQGRVTMTRNISISTAYMELSSLGPEDTAVYYCARGFYKWNDW | | (“HC”) amino acid sequence |
| | | SFDYWGQGTLVTVSS | | |
| Ab 906 | 1812 | QSVLTQPPSVSVAPGQTARITCGGNNIGSKSVHWYQQKPGQAPVLVVYDDSDRPS | ADI-41788 | Light chain variable region |
| | | GIPERFSGSNSGNTAPLTISRVEAGDEADYYCQVWDGDSAHHAVFGGGTQLTVL | | (“LC”) amino acid sequence |
| Ab 907 | 1813 | QVQLVQSGAEVKKPGSSVKVSCKASGGTFSNYGISWVRQAPGQGLERLGGIIPIYG | ADI-41790 | Heavy chain variable region |
| | | TANHAQNFQGRVTITADESTSTAYMELSSLRSEDTAVYYCARDGTFVRYYGMDVW | | (“HC”) amino acid sequence |
| | | GQGTTVTVSS | | |
| Ab 907 | 1814 | EIVLTQSPATLFLSPGERATLSCRASQSVSNYLAWFQQKPGQAPRLLIYDTSIRATGIP | ADI-41790 | Light chain variable region |
| | | ARFSGSGSGTDFTLTISSLEPEDFAFYYCQQRSNWPPTFGGGTKLEIK | | (“LC”) amino acid sequence |
| Ab 908 | 1815 | QVQLVQSGGGLVKHGGSLRLSCAASGFTFSSYSMNWVRQAPGKGLEWASSISSSS | ADI-41792 | Heavy chain variable region |
| | | SYIYYADSVKGRFTISRDNAKNSLYLQMNSLRAEDTAVYYCARTEYSSSSPIFDYWG | | (“HC”) amino acid sequence |
| | | QGTLVTVSS | | |
| Ab 908 | 1816 | QSVLTQPPSVSGAPGQRVTISCTGSSSNIGAGYDVHWYQQLPGTAPKLLTYGNSNR | ADI-41792 | Light chain variable region |
| | | PSGVPDRFSGSKSGTSASLAITGLQAEDEADYYCQSYDSSLSGSVFGGGTKVTVL | | (“LC”) amino acid sequence |
| Ab 909 | 1817 | EVQLQQWGAGLLKPSETLSLTCAVYGGSFSGYYWSWIRQPPGKGLEWIGEINHSG | ADI-41794 | Heavy chain variable region |
| | | STNYNPSLKSRVTISVDTSKNQFSLKLSSVTAADTAVYYCARGTRTIVYCDGDCYQP | | (“HC”) amino acid sequence |
| | | WAYHYYGMDVWGQGTTVTVSS | | |
| Ab 909 | 1818 | QSVVTQEPSVSAAPGQKVTISCSGGSSNIGNNYVSWYQHLPGTAPKLLIYDNDKRP | ADI-41794 | Light chain variable region |
| | | SGIPDRFSGSKSGTSATLGITGLQTGDEADYYCGTWDSSLSAVVFGGGTKLTVL | | (“LC”) amino acid sequence |
| Ab 910 | 1819 | QVQLVQSGAEVKKPGSSVKVSCQASGGTFSTHALSWVRQTPGHGLEWVGGVLPV | ADI-41799 | Heavy chain variable region |
| | | FGATKYPRKFQGRVTITADKSTNTAYMELSSLRSDDTAVYYCARVVVHSTITTAKDF | | (“HC”) amino acid sequence |
| | | FSGVHDIWGQGTMVTVSS | | |
| Ab 910 | 1820 | DIRMTQSPSTLSASVGDRVTITCRASQTVSSWLAWYQQKPGKAPKLLIYQASSLESG | ADI-41799 | Light chain variable region |
| | | VPSRFSGSGSGTEFTLTISGLQPDDFATYFCQHYNSYSPVTFGGGTKVEIK | | (“LC”) amino acid sequence |
| Ab 911 | 1821 | QVQLVQSGAEVKKPGASVKVSCKASGYTFTDYYMHWVRQAPGQGLEWLAWINP | ADI-41800 | Heavy chain variable region |
| | | YTGGTNYAQKFQGRVTLTRDTSVSTTYMEVTRLRSDDTAVYYCARGESFHHWGQ | | (“HC”) amino acid sequence |
| | | GTLVTVSS | | |
| Ab 911 | 1822 | QSALTQPASVSGSPGQSITISCTGTSSDIGGYDYVSWYQQHPGKVPKLMIYEVSTRP | ADI-41800 | Light chain variable region |
| | | SGVSIRFSGSKSGNTASLTISGLQAEDEADYYCSSYTRSTITSVVFGGGTKLTVL | | (“LC”) amino acid sequence |
| Ab 912 | 1823 | RCTLQQWGAGRVKPSETLSLTCAVYRGPFSGYYWSWIRQPPGKGLEWIGEINLGE | ADI-41803 | Heavy chain variable region |
| | | TNPGGSTHYNPSLRSRLSMSIDTSKKQFSLRVNSVTAADTAVYYCTRGPVSRIYDTS | | (“HC”) amino acid sequence |
| | | GSYSLNYYGMDVWGQGTTVTVSS | | |
| Ab 912 | 1824 | DIRMTQSPSSLSASVGDRVTITCRASQGIRNDLGWYQQKPGRAPERLIYPASSLQG | ADI-41803 | Light chain variable region |
| | | GVPSRFIASGSGTEFTLTISNLQPEDFATYYCLQHNSYPRTFGQGTKVEIK | | (“LC”) amino acid sequence |
| Ab 913 | 1825 | QVQLQQWGAGLLKPSETLSLTCSVLGGSFSGYYWTWIRQPPGKGLEWIGEITHDG | ADI-41804 | Heavy chain variable region |
| | | SSNYNPSLNSRVTISVDTSNYQFSLKMRSVTAADTAVYYCARSPDLTIFGGLYFYYGI | | (“HC”) amino acid sequence |
| | | SVWGQGTTVTVSS | | |
| Ab 913 | 1826 | DIQMTQSPSSLSASMGDRVTITCRASQDISNYLAWYQQKPGKVPNLLIYAASTLQG | ADI-41804 | Light chain variable region |
| | | GVPSRFSGSGSGTDFTLTISSLQPEDVAIYYCQKYKSAPRTFGQGTKVEIK | | (“LC”) amino acid sequence |
| Ab 914 | 1827 | QVQLVQSGAEVKKPGESLKISCKASGYSFTSYWIAWVRQMPGKGLEWMGIIFPGD | ADI-41805 | Heavy chain variable region |
| | | SDTRYSPSFQGQVTISADKSISTAYLQWSSLEASDTAMYYCAKSTTYYYYGLDVWG | | (“HC”) amino acid sequence |
| | | QGTTVTVSS | | |
| Ab 914 | 1828 | QPVLTQPASVSGSPGQSITISCTGTSSDVGGYDYVSWYQQYPGKAPKLMIYEVSNR | ADI-41805 | Light chain variable region |
| | | PLGVSNRFSGSRSGYTASLTISGLQAEDETNYYCSSYTSSRTWVFGGGTKLTVL | | (“LC”) amino acid sequence |
| Ab 915 | 1829 | EVQLLESGPALVKPTQTLTLTCTFSGFSLTTTRMSVSWIRQPPGKALEWLARIDWD | ADI-41807 | Heavy chain variable region |
| | | DDKYYSTSLKTRLTISKDTSKNQVVLTMTNMDPVDTATYFCARVNVYAANGYYSYY | | (“HC”) amino acid sequence |
| | | LDYWGQGTLVTVSS | | |
| Ab 915 | 1830 | DIVMTQTPSSLSASVGDRVTITCRTSQSSSRYLNWYQKEPGKAPRLLIYLASALRSGV | ADI-41807 | Light chain variable region |
| | | PSRFSGSGSGTDFTLTISSLQSEDFATYYCQQTYSIPWTFGQGTKVEIK | | (“LC”) amino acid sequence |
| Ab 916 | 1831 | QVQLVQSGAELKKPGSSVRISCKVSGVTSDNYAITWVRQAPGQGLEWMGRVIPIF | ADI-41808 | Heavy chain variable region |
| | | PVPQYAQKFQGRVTLSADKSTRTAYLELHSLRSEDTATYYCATHRPSDSWGQGTLV | | (“HC”) amino acid sequence |
| | | TVSS | | |
| Ab 916 | 1832 | DIRVTQSPSTLSASVGDRVTITCRASQNINSWLAWYQQKPGKAPKLLIFKASSLESG | ADI-41808 | Light chain variable region |
| | | VPARFSGSGFGTEFTLTITSLQPDDFASYYCQQYDTYPYPFGQGTKVEIK | | (“LC”) amino acid sequence |
| Ab 917 | 1833 | QVTLKESGGGLVQPGGSLRLSCAASGFTFSNYAMSWVRQAPGKGLEWVSAISHSD | ADI-41809 | Heavy chain variable region |
| | | SRTFYADSVKGRFTISRDNSKNTLFLQMDSLRAHDTAVYYCANVDPSSVTYYGYYYG | | (“HC”) amino acid sequence |
| | | MDVWGQGTTVTVSS | | |
| Ab 917 | 1834 | QSVLTQPPSASGTPGQRVTISCSGSSSNIGKNFVYWYQQFPGTAPKRLIYRNNQRP | ADI-41809 | Light chain variable region |
| | | SGVPDRFSGSRSGTSASLAISGLRSEDEADYYCATWDDSLSGWVFGGGTKLTVL | | (“LC”) amino acid sequence |
| Ab 918 | 1835 | QVQLVQSGGGVVQPGRSLRLSCAASGFNFHNYAMHWVRQAPGKGLEWVAVISY | ADI-41810 | Heavy chain variable region |
| | | DGGNKHYADSVKGRFTISRDNSKNTLYLQMNSLRPDDTAVYYCARGHSDWRGDY | | (“HC”) amino acid sequence |
| | | FDFWGQGTLVTVSS | | |
| Ab 918 | 1836 | DIQLTQSPATLSVSPGERAILSCRASQNVGTNLAWYQQKPGQAPRLLIYDASTRATG | ADI-41810 | Light chain variable region |
| | | IPARFSGSGAGTDFTLTISGLQSEDFAVYYCQQYINWPPYTFGQGTKLEIK | | (“LC”) amino acid sequence |
| Ab 919 | 1837 | QVQLQQSGPRLVKPSHTLSLTCVISGDSVSSGSAAWSWIRQSPSRGLEWLGRTYYR | ADI-41811 | Heavy chain variable region |
| | | SKWYYDYAVSVKGRIIQPDTSKNQFSLQLNSVSPEDTAVYYCARDPDSGNYFHYYG | | (“HC”) amino acid sequence |
| | | MDVWGQGTTVTVSS | | |
| Ab 919 | 1838 | DIVMTQSPATLSLSPGERATLSCRASQSVDVYFAWYQQKPGQAPRLLIYDASKRAS | ADI-41811 | Light chain variable region |
| | | GVPARFSGSASGTDFTLTISSLEPEDFAVYYCQQRAKWPPYTFGQGTKLEIK | | (“LC”) amino acid sequence |
| Ab 920 | 1839 | EVQLVESGGGLVKPGGSLRLSCAASGFTFSSYSMNWVRQAPGKGLEWVSSISAGSS | ADI-41812 | Heavy chain variable region |
| | | YTDYAESVKGRFTISRDNAKNSLYLKMNSLRAEDTAVYYCARDPGYCSSNSCTVAM | | (“HC”) amino acid sequence |
| | | DVWGQGTTVTVSS | | |
| Ab 920 | 1840 | SYELTQPPSVSGAPGQRVTISCTGSSSNIGAGYDVHWYQQLPGTAPKLLIYGNNNR | ADI-41812 | Light chain variable region |
| | | PSGVPDRFSGSKSGTSASLAITGLQAEDEADYYCQSYDRTLVIFGGGTKLTVL | | (“LC”) amino acid sequence |
| Ab 921 | 1841 | EVQLLESGPTLVKPTQTLTLTCTFSGFSLSTFGVGVGWIRQPPGKALECLALIYWDD | ADI-41814 | Heavy chain variable region |
| | | DKRYSPSLKSRLTITRDTSKNQVVLTMTNMDPVDTATYYCAHRRSSTVTTGFFDYW | | (“HC”) amino acid sequence |
| | | GRGTLVTVSS | | |
| Ab 921 | 1842 | QPVLTQPPSVSGAPGQRVTVSCTGNSSNIGAGHGAHWYQQLPGTAPKLLIYGSTD | ADI-41814 | Light chain variable region |
| | | RPSGVPDRFFGSQSGTSASLVITELRAEDEADYYCQSFDSSLSIWVFGGGTKLTVL | | (“LC”) amino acid sequence |
| Ab 922 | 1843 | EVQLLESGGGLVKPGGSLRLSCGASGFTFSTSSFNWVRQAPGKGLEWVSSISSTSSY | ADI-41815 | Heavy chain variable region |
| | | VFYADSVKGRFTVSRDNAQNSLYLQMNSLRAEDTAVYYCARARGVGATIGFDYW | | (“HC”) amino acid sequence |
| | | GQGTLVTVSS | | |
| Ab 922 | 1844 | DIVMTQSPLSLPVTPGEPASISCRSSQSLLHSNGYNYLDWYLQKPGQSPQLLIYLGSN | ADI-41815 | Light chain variable region |
| | | RASGVPDRFSGSGSGTDFTLKISRVEAEDVGVYYCMQALQTPYTFGQGTKVEIK | | (“LC”) amino acid sequence |
| Ab 923 | 1845 | QVQLVQSGAEVKKPGASVKVSCEASGYTFTDSYIHWVRQAPGQGLEWMGWINP | ADI-41816 | Heavy chain variable region |
| | | NSGGTNYAQKFQGRVTMTRDTSTSTAFIELSRLRSDDTAVYYSARGVRQQWLVNT | | (“HC”) amino acid sequence |
| | | GDPDYYFDFWGQGTLVTVSS | | |
| Ab 923 | 1846 | SYVLTQPPSVSVSPGQTASITCSGDKLGDKYSCWYQQKPGQSPVLVIYQDYKRPSGI | ADI-41816 | Light chain variable region |
| | | PERFSGSNSGNTATLTISGTQAMDEADYYCQAWDRNAGVFGTGTKLTVL | | (“LC”) amino acid sequence |
| Ab 924 | 1847 | QVQLVQSGAEVKKPGESLKISCKGPGYSFTTYWIGWVRQMPGKGLEWMGIIYPG | ADI-41817 | Heavy chain variable region |
| | | DSDTKYSPSFQGQVTITADKSIATAYLQWSRLKASDTAVYYCATVVTYADNIRWFDS | | (“HC”) amino acid sequence |
| | | WGQGTLVTVSS | | |
| Ab 924 | 1848 | QSALTQPASVSGSPGQSITISCTGTSGDVGGYKFVSWYQHHPGKAPKLVIYDVANR | ADI-41817 | Light chain variable region |
| | | PSGVSDRFSGSKSGTTASLTISGLQAEDEADYYCSSYTSSSTYVFGTGTKVTAL | | (“LC”) amino acid sequence |
| Ab 925 | 1849 | EVQLVESGGGLVQPGGSLRLSCAASGFTVNTNYMSWVRQAPGKGLEWVSIIYSSG | ADI-41818 | Heavy chain variable region |
| | | STSYADSVKGRFTISRDNSENTLYLQMHTLRAEDTAVYYCVRERTPFYYVSSGYWDS | | (“HC”) amino acid sequence |
| | | WGQGTLVTVSS | | |
| Ab 925 | 1850 | EIVLTQSPGTLSLSPGERATLSCRASQSVDSSYLAWYQQKPGQAPRLLIFGASSRATG | ADI-41818 | Light chain variable region |
| | | IPDRFSGSGSGTDFTLTISRLEPEDFAVYYCQQYGFSYTFGQGTKVEIK | | (“LC”) amino acid sequence |
| Ab 926 | 1851 | EVQLVESGGGVVQPGRSLRLSCAVSGFTFSTYGMHWVRQTPGRGLEWVAVISYD | ADI-41820 | Heavy chain variable region |
| | | GNHKYYADSVMGRFTISRDNSKDTLYLQVNSLRPEDSAVYYCAKDRIHCPNGVCYV | | (“HC”) amino acid sequence |
| | | HSSFYGLDVWGQGTTVTVSS | | |
| Ab 926 | 1852 | QTVVTQEPSLIVSPGGIVTLICGSSTGAVTSGHYPYWLQQKPGQAPRTLIYDTTNK | ADI-41820 | Light chain variable region |
| | | DSWTPARFSGSLLGGKAALTLSGAQPEDEAQYYCLLSENGPYWVFGGGTKVTVL | | (“LC”) amino acid sequence |
| Ab 927 | 1853 | EVQLSESAGGVVQPGGSLRLTCAASGFSFSTNGMHWVRQAPGKGLEWVAFIRYD | ADI-41827 | Heavy chain variable region |
| | | GSKKYYAESVKGRFTISREDSNNTLYLQMNSLRPEDTAVYYCAKEDCSGGTCYHERN | | (“HC”) amino acid sequence |
| | | YYYYGMDVWGQGTTVTVSS | | |
| Ab 927 | 1854 | QPVLTQPPSLPVSPGQTASITCSGDKLEYKYACWYQHKPGQSPVLVIYQDNKRPSGI | ADI-41827 | Light chain variable region |
| | | PERFSGSNSGNTATLTISGTQPMDEADYYCQAWDSSTVVFGGGTKVTVL | | (“LC”) amino acid sequence |
| Ab 928 | 1855 | EVQLVESGGGLVQPGGSLRLSCADSDFTFSTYSMNWVRQAPGKGLEWISYITGRSS | ADI-41828 | Heavy chain variable region |
| | | AIYYADSVKGRFTISRDNAKNSLFLQMNSLRAEDTAVYYCTTFMAGYSFGHGDAFD | | (“HC”) amino acid sequence |
| | | IWGQGTTVTVSS | | |
| Ab 928 | 1856 | SYELTQPPSVSVAPGQTARITCGGNNIGSKSVHWYQQKPGQAPVLVVYDDSDRPS | ADI-41828 | Light chain variable region |
| | | GIPERFSGSNSGNTATLTISRVEAGDEADYYCQVWNSNSDHPHWVFGGGTQLTVL | | (“LC”) amino acid sequence |
| Ab 929 | 1857 | EVQLVESGGGLVKPGGSLRLSCAASGFTSSGYNMNWVRQAPGKGLEWVSSISGSS | ADI-41829 | Heavy chain variable region |
| | | SYIHYADSVKGRFTISRDNAKNSLYLQMNSLRAEDTAVYYCATVGALPGHFDNWG | | (“HC”) amino acid sequence |
| | | QGTLVTVSS | | |
| Ab 929 | 1858 | QAVVTQEPSVSGAPGQRVTISCTGSSSNIGAGYDVHWYQQLPGTAPKLLIYDNTNR | ADI-41829 | Light chain variable region |
| | | PSGVPDRFSGSKSGTSASLAITGLQAEDEADYYCQSYDSRLTYVFGTGTKVTVL | | (“LC”) amino acid sequence |
| Ab 930 | 1859 | QVQLVQSGPAVKKPGASVKVSCKASGYIFTSYGVSWVRQAPGQGLEWMGWISGY | ADI-41830 | Heavy chain variable region |
| | | NGNTDYAQKFQGRVTLTVDSSTGTVYMDLRSLRSDDTAIYYCARAPPLPGQVYDG | | (“HC”) amino acid sequence |
| | | AGSYLLHGYWGQGTLVTVSS | | |
| Ab 930 | 1860 | DIVMTQSPLSLPVTPGEPASISCRSSQSLLHSNGYNYLDWYLQKPGQSPQLLIYLGSN | ADI-41830 | Light chain variable region |
| | | RASGVPDRFSGSGSGTDFTLKISRVEAEDVGVYYCMQALQTPRTFGQGTKVEIK | | (“LC”) amino acid sequence |
| Ab 931 | 1861 | EVQLLESGGGLVKPGGSLRLSCAASGFTFSSYAMHWVRQPPGKGLEWVSSISASSS | ADI-41831 | Heavy chain variable region |
| | | FINYADSVKGRFTISRDGARNSLYLQMNSLRAEDTAVYYCVREDYDSSGYGLHWFD | | (“HC”) amino acid sequence |
| | | PWGQGTTVTVSS | | |
| Ab 931 | 1862 | SYVLTQPPSVSGAPGQRVTISCTGSSSNIGAGYDVHWYQQFPGTAPKLLMYGNTN | ADI-41831 | Light chain variable region |
| | | RPSGVPDRFSGSKSGTSASLAITGLQAEDEADYYCQSYDRSLSGWVFGGGTKLTVL | | (“LC”) amino acid sequence |
| Ab 932 | 1863 | EVQLVESGGGLVQPGGSLRLSCAASGFTFSKYAMNWVRQAPGKGLEWVSSISDSG | ADI-41832 | Heavy chain variable region |
| | | DSRYYADSVKGRFTISRDSSKNTLNLQMNSLRAEDTAVYYCAKAGWELFSPQGAFD | | (“HC”) amino acid sequence |
| | | LWGQGTMVTVSS | | |
| Ab 932 | 1864 | EIVMTQSPGTLSLSPGERATLSCRASQSVSSSHLAWYQQKPGQAPRLLIYGASSRDS | ADI-41832 | Light chain variable region |
| | | GIPDRFSGSGSGTDFTLSISRLEPEDFAVYYCQHYGNSPYTFGQGTKVDIK | | (“LC”) amino acid sequence |
| Ab 933 | 1865 | EVQLLESGGGLVQPGGSLRLSCAASRFTFSTYAMSWVRQAPGKGLEWVSSISGSG | ADI-41833 | Heavy chain variable region |
| | | DKTFYTDSVKGRFTISRDNSKNTLYLQMNSLRAEDTAVYYCARESYYELWTGTYPG | | (“HC”) amino acid sequence |
| | | WELDYWGQGTLVTVSS | | |
| Ab 933 | 1866 | DIQLTQSPSSLSASVGDRVTITCRASQDISNYLAWYQQKPGKPPKLLIYAASILESGAP | ADI-41833 | Light chain variable region |
| | | SRFSGSGSGTDFTLTISSLQPEDVGTYYCQKSNSAPRPFGQGTKVEIK | | (“LC”) amino acid sequence |
| Ab 934 | 1867 | EVQLLESGGRLVQPGRSLRLSCAASGFTVSGSYMSWVRQAPGKGLEWVSVIYIDG | ADI-41834 | Heavy chain variable region |
| | | GTKYADSVKGRFTISRDNSKNTVYLQMNSLRAEDTAVYYCARDSSLWYRGGDYWG | | (“HC”) amino acid sequence |
| | | QGTLVTVSS | | |
| Ab 934 | 1868 | DIQMTQSPSSLSASVGDRVTITCQANHDISNYLNWYQQKPGKAPKLLIYDASILEAG | ADI-41834 | Light chain variable region |
| | | VPSRFSGSGSGTHFTFTISSLQPEDIATYYCQQFDFRALTFGGGTKVEIK | | (“LC”) amino acid sequence |
| Ab 935 | 1869 | EVQLLESGGGLVQPGGSLRLSCAASGFTFSSYAMNWVRQAPGKGLEWVSIISDSG | ADI-41835 | Heavy chain variable region |
| | | GSTYYADSVKGRFTISRDNSKNTLYLQMNSLRAEDTAVYYCAKATPLKWELLIGSTP | | (“HC”) amino acid sequence |
| | | GYYFDYWGQGTTVTVSS | | |
| Ab 935 | 1870 | SYELTQLPSVSVSPGQTASITCSGDKLGDKYACWYQQKPGQSPVVIMYQDNKRPS | ADI-41835 | Light chain variable region |
| | | GIPERFSGSNSGNTATLTISGTQAMDEADYYCQAWDSSTGVFGGGTKVTVL | | (“LC”) amino acid sequence |
| Ab 936 | 1871 | EVQLLESGAEVKKPGASVKVSCRASGYTFTSNTLHWVRQAPGQGLEWMGWINAD | ADI-41836 | Heavy chain variable region |
| | | NGNTRYSQKFQGRVTITRDTSANTAYMELSSLISEDTAVYYCAREWSGFWSGLNW | | (“HC”) amino acid sequence |
| | | FEPWGQGTLVTVSS | | |
| Ab 936 | 1872 | QSVLTQPPSVSGAPGQRVTISCTGSSSNIGSGNDVHWYQQFPGTAPKVLIYVNSIRP | ADI-41836 | Light chain variable region |
| | | SGVSDRFSGSKSGTSASLAITGLRAEDEADYYCQSYDSSLNGVAFGGGTKLTVL | | (“LC”) amino acid sequence |
| Ab 937 | 1873 | QVQLVQSGAEVKKPGASVKVSCKASGYTFTSYGISWVRQAPGQGLEWMGWISAY | ADI-41837 | Heavy chain variable region |
| | | SGDTDYAQKLQGRVTMTTDTATSTAYMELRSLRSDDTAVYYCARDAHCSSTNCYID | | (“HC”) amino acid sequence |
| | | LGGAPVDYWGQGTLVTVSS | | |
| Ab 937 | 1874 | DIVLTQTPLSLSVTLGQPASISCRSSQSLVYIDGYTYLNWFQQRPGQSPRRLIYKVSN | ADI-41837 | Light chain variable region |
| | | RDSGVPDRFSGSGSGTDFTLKISRVEAEDVGVYYCMQGAHWPWTFGQGTKVEIK | | (“LC”) amino acid sequence |
| Ab 938 | 1875 | EVQLLESGGGVVQPGRSLRLSCAASEFTFRSYAMHWVRQAPGMGLEWVAVTPYD | ADI-41838 | Heavy chain variable region |
| | | GISKYYADSVKGRFTISRDNSKNTLYLQMNSLRPEDTAVYYCARGFPEPITSWPGYF | | (“HC”) amino acid sequence |
| | | YAMDVWGQGTTVTVSS | | |
| Ab 938 | 1876 | QSALTQPASVSGSPGQSITISCTGTTSDVGVYNYVSWYQQHPGKAPKLMIYDVSNR | ADI-41838 | Light chain variable region |
| | | PSGVSNRFSGSKSGNTASLTISGLQAEDEADYYCSSYTNSDTPVVFGGGTKLTVL | | (“LC”) amino acid sequence |
| Ab 939 | 1877 | EVQLLESGGGVVQPGGSLRLSCVASGFTFSAYGMHWVRQAPGKGPEWVAMTRS | ADI-41839 | Heavy chain variable region |
| | | DGNKIYYADSVKGRFTISRDDSKNTLYLEMNSLRPDDTAVYFCAKEVGYGGNSLHY | | (“HC”) amino acid sequence |
| | | WGQGTLVTVSS | | |
| Ab 939 | 1878 | SYELIQPPSVSVAPGQTAKITCGGNNIGSKSVHWYQQKPGQAPVLVVFDDSDRPSG | ADI-41839 | Light chain variable region |
| | | IPERFSGSNSGNTATLTISRVEAGDEADYYCQVWDFSSDLWVFGGGTKLTVL | | (“LC”) amino acid sequence |
| Ab 940 | 1879 | QVQLVQSGAEVKKPGSSVKVSCKASGDTFSGYAIYWVRQAPGRGLELMGGIIPILG | ADI-41840 | Heavy chain variable region |
| | | TSSYAQRFLGRTSFTADESTSTAYMDLSSLTSADTAMYYCARKRVTVPVPFDSWGQ | | (“HC”) amino acid sequence |
| | | GTLVTVSS | | |
| Ab 940 | 1880 | EIVMTQSPATLSVSPGERATLSCRASQSVSSNLAWYQQKLGQAPRLLIYGASTRATD | ADI-41840 | Light chain variable region |
| | | IPARFSGSGSGTEFTLTISSLQSEDFVVYYCQQYNNWPWTFGQGTKVEIK | | (“LC”) amino acid sequence |
| Ab 941 | 1881 | EVQLLESGGGLVKPGGSLRLSCAASGFSFSYYSMNWVRQTPGKGLEWVSSISDRSS | ADI-41841 | Heavy chain variable region |
| | | YISYADSVKGRFTISRDNAKNSLYLQMNSLRAEDTAVYYCARDQYESYAFDIWGQG | | (“HC”) amino acid sequence |
| | | TTVTVSS | | |
| Ab 941 | 1882 | DIQVTQSPSSLSASVGDRITITCQASQDVGNYLNWYQQKVGKAPKLLIHDASDLET | ADI-41841 | Light chain variable region |
| | | GVPSRFSGSGSGTYFTFTISSLQPEDFATYYCQPYDNLRPVTFGQGTRLEIK | | (“LC”) amino acid sequence |
| Ab 942 | 1883 | QVQLVQSGAEVKKPGASVRVSCKASGYTFTHYDINWVRQAPGQGLEWMGWINP | ADI-41842 | Heavy chain variable region |
| | | NSGDTDYAQKFQGRVTMTVDTSISTAYLDLRSLTSADAAVYYCARGGAYAINGYYII | | (“HC”) amino acid sequence |
| | | WFDPWGQGTLVTVSS | | |
| Ab 942 | 1884 | DIVVTQSPSSLSASVGDRVTITCRASQSISRYLNWFQKKPGKAPHLLIYAASILQSEVP | ADI-41842 | Light chain variable region |
| | | SRFSGSGSGTDFTLTISSLQPEDFATYYCQQSYNSPYTFGPGTKVDIK | | (“LC”) amino acid sequence |
| Ab 943 | 1885 | QVQLQQWGAGLLKPSETLSLTCAVYGGSFSGYYWSWIRQPPGKGLEWIGEINHSG | ADI-43638 | Heavy chain variable region |
| | | STNYNPSLKSRVTISVDTSKNQFSLKLSSVTAADTAVYYCARGVPVLRYFDWLRFGY | | (“HC”) amino acid sequence |
| | | GMDVWGQGTTVTVSS | | |
| Ab 943 | 1886 | EIVMTQSPDSLAVSLGERATINCKSSQSVLYSSNNKNYLAWYQQKPGQPPKLLIYW | ADI-43638 | Light chain variable region |
| | | ASTRESGVPDRFSGSGSGTDFTLTISSLQAEDVAVYYCQQYYSTPPLTFGGGTKLEIK | | (“LC”) amino acid sequence |
| Ab 944 | 1887 | QVQLVQSGSELKKPGASVKVSCKASGYTFTSYAMNWVRQAPGQGLEWMGWINT | ADI-43639 | Heavy chain variable region |
| | | NTGNPTYAQGFTGRFVFSLDTSVSTAYLQISSLKAEDTAVYYCAAYGIHDAFDIWGQ | | (“HC”) amino acid sequence |
| | | GTMVTVSS | | |
| Ab 944 | 1888 | DIRLTQSPSSLSASVGDRVTITCRASQSISSYLNWYQQKPGKAPKLLIYAASSLQSGVP | ADI-43639 | Light chain variable region |
| | | SRFSGSGSGTDFTLTISSLQPEDFATYYCQQSYSTPRTFGQGTKVEIK | | (“LC”) amino acid sequence |
| Ab 945 | 1889 | QVQLVQSGGGLVKPGGSLRLSCAASGFTFSSYSMNWVRQAPGKGLEWVSSISSSS | ADI-43640 | Heavy chain variable region |
| | | SYIYYADSVKGRFTISRDNAKNSLYLQMNSLRAEDTAVYYCAREGRDGYNYNFDYW | | (“HC”) amino acid sequence |
| | | GQGTLVTVSS | | |
| Ab 945 | 1890 | QSVVTQPPSVSGAPGQRVTISCTGSSSNIGAGYDVHWYQQLPGTAPKLLIYGNSNR | ADI-43640 | Light chain variable region |
| | | PSGVPDRFSGSKSGTSASLAITGLQAEDEADYYCQSYDSSLSGVVFGGGTKLTVL | | (“LC”) amino acid sequence |
| Ab 946 | 1891 | EVQLVESGGGLVKPGGSLRLSCAASGFTFSDYYMSWIRQAPGKGLEWVSYISSSSSY | ADI-43641 | Heavy chain variable region |
| | | TNYADSVKGRFTISRDNAKNSLYLQMNSLRAEDTAVYYCARDFSGQWLVLGYGM | | (“HC”) amino acid sequence |
| | | DVWGQGTTVTVSS | | |
| Ab 946 | 1892 | QSVVTQPPSVSGAPGQRVTISCTGSSSNIGAGYDVHWYQQLPGTAPKLLIYGNSNR | ADI-43641 | Light chain variable region |
| | | PSGVPDRFSGSKSGTSASLAITGLQAEDEADYYCQSYDSSLSGPVFGGGTKLTVL | | (“LC”) amino acid sequence |
| Ab 947 | 1893 | EVQLLESGGGLVKPGGSLRLSCAASGFTFSSYSMNWVRQAPGKGLEWVSSISSSSS | ADI-43642 | Heavy chain variable region |
| | | YIYYADSVKGRFTISRDNAKNSLYLQMNSLRAEDTAVYYCARDGADSSYYYYMDVW | | (“HC”) amino acid sequence |
| | | GKGTTVTVSS | | |
| Ab 947 | 1894 | QAVVTQPPSVSGAPGQRVTISCTGSSSNIGAGYDVHWYQQLPGTAPKLLIYGNSNR | ADI-43642 | Light chain variable region |
| | | PSGVPDRFSGSKSGTSASLAITGLQAEDEADYYCQSYDSSLSGSVFGGGTKLTVL | | (“LC”) amino acid sequence |

### Exemplary Embodiments

[0399] 1. An isolated antibody or antigen-binding fragment thereof that cross-competes for binding or specifically binds to the same epitope(s) of a Respiratory Syncytial Virus (RSV) fusion glycoprotein (F) (“an anti-RSV F antibody”) as an antibody or antigen-binding fragment thereof comprising a CDRH3 amino acid sequence that is at least 80%, 85%, 90%, 95%, 96%, 97%, 98%, or 99% identical to a CDRH3 amino acid sequence of an antibody selected from Antibody Number 1 through Antibody Number 465 as disclosed in Table 5.

[0400] 2. An isolated antibody or antigen-binding fragment thereof that cross-competes for binding or specifically binds to the same epitope(s) of a Respiratory Syncytial Virus (RSV) fusion glycoprotein (F) (“an anti-RSV F antibody”) as an antibody or antigen-binding fragment thereof comprising a CDRH2 amino acid sequence that is at least 80%, 85%, 90%, 95%, 96%, 97%, 98%, or 99% identical to a CDRH2 amino acid sequence of an antibody selected from Antibody Number 1 through Antibody Number 947 as disclosed in Table 5.

[0401] 3. An isolated antibody or antigen-binding fragment thereof that cross-competes for binding or specifically binds to the same epitope(s) of a Respiratory Syncytial Virus (RSV) fusion glycoprotein (F) (“an anti-RSV F antibody”) as an antibody or antigen-binding fragment thereof comprising a CDRH1 amino acid sequence that is at least 80%, 85%, 90%, 95%, 96%, 97%, 98%, or 99% identical to a CDRH1 amino acid sequence of an antibody selected from Antibody Number 1 through Antibody Number 947 as disclosed in Table 5.

[0402] 4. An isolated antibody or antigen-binding fragment thereof that cross-competes for binding or specifically binds to the same epitope(s) of a Respiratory Syncytial Virus (RSV) fusion glycoprotein (F) (“an anti-RSV F antibody”) as an antibody or antigen-binding fragment thereof comprising a CDRL3 amino acid sequence that is at least 80%, 85%, 90%, 95%, 96%, 97%, 98%, or 99% identical to a CDRL3 amino acid sequence of an antibody selected from Antibody Number 1 through Antibody Number 947 as disclosed in Table 5.

[0403] 5. An isolated antibody or antigen-binding fragment thereof that cross-competes for binding or specifically binds to the same epitope(s) of a Respiratory Syncytial Virus (RSV) fusion glycoprotein (F) (“an anti-RSV F antibody”) as an antibody or antigen-binding fragment thereof comprising a CDRL2 amino acid sequence that is at least 80%, 85%, 90%, 95%, 96%, 97%, 98%, or 99% identical to a CDRL2 amino acid sequence of an antibody selected from Antibody Number 1 through Antibody Number 947 as disclosed in Table 5.

[0404] 6. An isolated antibody or antigen-binding fragment thereof that cross-competes for binding or specifically binds to the same epitope(s) of a Respiratory Syncytial Virus (RSV) fusion glycoprotein (F) (“an anti-RSV F antibody”) as an antibody or antigen-binding fragment thereof comprising a CDRL1 amino acid sequence that is at least 80%, 85%, 90%, 95%, 96%, 97%, 98%, or 99% identical to a CDRL1 amino acid sequence of an antibody selected from Antibody Number 1 through Antibody Number 947 as disclosed in Table 5.

[0405] 7. The isolated anti-RSV F antibody of any one of embodiments 1 to 6, comprising (i) the CDRH3 amino acid sequence of an antibody selected from Antibody Number 1 through Antibody Number 947 as disclosed in Table 5; (ii) the CDRH2 amino acid sequence of an antibody selected from Antibody Number 1 through Antibody Number 947 as disclosed in Table 5; (iii) the CDRH1 amino acid sequence of an antibody selected from Antibody Number 1 through Antibody Number 947 as disclosed in Table 5; (iv) the CDRL3 amino acid sequence of an antibody selected from Antibody Number 1 through Antibody Number 947 as disclosed in Table 5; (v) the CDRL2 amino acid sequence of an antibody selected from Antibody Number 1 through Antibody Number 947 as disclosed in Table 5; (vi) the CDRL1 amino acid sequence of an antibody selected from Antibody Number 1 through Antibody Number 947 as disclosed in Table 5; or (vii) any combination of two or more of (i), (ii), (iii), (iv), (v), and (vi).

[0406] 8. An isolated antibody or antigen-binding fragment thereof that cross-competes for binding or specifically binds to the same epitope(s) of a Respiratory Syncytial Virus (RSV) fusion glycoprotein (F) (“an anti-RSV F antibody”) as an antibody or antigen-binding fragment thereof comprising (i) a heavy chain variable region (V_{H}) that is at least 80%, 85%, 90%, 95%, 96%, 97%, 98%, or 99% identical to a V_{H} amino acid sequence of an antibody selected from Antibody Number 1 through Antibody Number 947 as disclosed in Table 5, and/or (ii) a light chain variable region (V_{L}) that is at least 80%, 85%, 90%, 95%, 96%, 97%, 98%, or 99% identical to a V_{L} amino acid sequence of an antibody selected from Antibody Number 1 through Antibody Number 947 as disclosed in Table 5.

[0407] 9. The isolated anti-RSV F antibody of embodiment 8, comprising (i) the V_{H} amino acid sequence of an antibody selected from Antibody Number 1 through Antibody Number 947 as disclosed in Table 5; and/or (ii) the V_{L} amino acid sequence of an antibody selected from Antibody Number 1 through Antibody Number 947 as disclosed in Table 5.

[0408] 10. The isolated anti-RSV F antibody of any one of embodiments 1 to 9, which is selected from the group consisting of Antibody Number 1 through Antibody Number 947 as disclosed in Table 5.

[0409] 11. The isolated anti-RSV F antibody of any one of embodiments 1 to 10, which binds to an epitope comprising site 0, site I, site II, site III, site IV, or site V of RSV F.

[0410] 12. The isolated anti-RSV F antibody of any one of embodiments 1 to 11, which binds to an epitope on prefusion F (preF), preferably antigenic site III.

[0411] 13. The isolated anti-RSV F antibody of any one of embodiments 1 to 12, which binds to prefusion F (preF) with high affinity but does not bind to or binds with low affinity to postfusion F (postF).

[0412] 14. The isolated anti-RSV F antibody of any one of embodiments 1 to 12, which binds to an epitope on postfusion F (post F), preferably antigenic site I.

[0413] 15. The isolated anti-RSV F antibody of any one of embodiments 1 to 14, which does not compete with D25 for binding to RSV F.

[0414] 16. The isolated anti-RSV F antibody of any one of embodiments 1 to 15, which competes with MPE8 and/or motavizumab for binding to RSV F.

[0415] 17. The isolated anti-RSV F antibody of any one of embodiments 1 to 16, which is a neutralizing antibody.

[0416] 18. The isolated anti-RSV F antibody of embodiment 17, which has a neutralizing activity (IC₅₀) of less than 100 μg/ml, 50 μg/ml, 25 μg/ml, 10 μg/ml, 5 μg/ml, 1 μg/ml, 0.5 μg/ml, 0.1 μg/ml, or 0.05 μg/ml.

[0417] 19. The isolated anti-RSV F antibody of any one of embodiments 1 to 18, which binds to RSV prefusion F with a K_{D} value of less than 50 nM, 25 nM, 10 nM, 5 nM, 1 nM, 0.5 nM, or 0.1 nM as measured by surface plasmon resonance.

[0418] 20. The isolated anti-RSV F antibody of any one of embodiments 1 to 19, which binds to RSV prefusion F through one or both of the following interactions:
[0419] a) Tyr33 in CDRL1 and Tyr93 in CDRL3 both contact the α6-α7 loop of RSV prefusion F; and
[0420] b) five consecutive serine residues, preferably followed by a tyrosine residue (Tyr56), in CDRH2 form a network of hydrogen bonds with Asp310 on (36 of RSV prefusion F.

[0421] 21. The isolated anti-RSV F antibody of any one of embodiments 1 to 20, which has a clean or low polyreactivity profile.

[0422] 22. The isolated anti-RSV F antibody of any one of embodiments 1 to 21, which is a full-length IgG1 monoclonal antibody.

[0423] 23. The isolated anti-RSV F antibody of any one of embodiments 1 to 22, which comprises a Fc region that has been modified to alter effector function, half-life, proteolysis, and/or glycosylation.

[0424] 24. The isolated anti-RSV F antibody of any one of embodiments 1 to 23, which is derivatized.

[0425] 25. An isolated nucleic acid sequence or nucleic acid sequences encoding an antibody or antigen-binding fragment thereof according to any one of embodiments 1 to 24.

[0426] 26. An expression vector or vectors comprising the isolated nucleic acid sequence according to embodiment 25.

[0427] 27. A host cell comprising the isolated nucleic acid sequence(s) according to embodiment 25 or the expression vector(s) according to embodiment 26.

[0428] 28. The host cell of embodiment 27, which is a mammalian cell, a bacterial cell, a fungal cell, a yeast cell, or an insect cell.

[0429] 29. A method for producing an isolated antibody or antigen-binding fragment thereof that specifically binds to Respiratory Syncytial Virus (RSV) fusion glycoprotein (F) (“an anti-RSV F antibody”) comprising expressing the nucleic acid sequence(s) of embodiment 25 or culturing the host cell of embodiment 27 or 28 under conditions that provide for expression of the anti-RSV F antibody and optionally recovering the anti-RSV F antibody from the host cell and/or culture medium.

[0430] 30. The method of embodiment 29, wherein the host cell is a yeast cell or a mammalian cell.

[0431] 31. A pharmaceutical composition comprising (i) the anti-RSV F antibody of any one of embodiments 1 to 24, the nucleic acid sequence(s) of embodiment 25, the expression vector(s) of embodiment 26, or the host cell of embodiments 27 or 28; and (ii) a pharmaceutically acceptable carrier and/or excipient.

[0432] 32. The pharmaceutical composition of embodiment 31 for use in preventing or treating a RSV infection in a subject.

[0433] 33. The pharmaceutical composition of embodiment 32, wherein the subject is a human, preferably an infant.

[0434] 34. A method of preventing or treating a Respiratory Syncytial Virus (RSV) infection in a subject, comprising administering to the subject in need thereof an effective amount of the anti-RSV F antibody of any one of embodiments 1 to 24, the isolated nucleic acid sequence(s) of embodiment 25, the expression vector(s) of embodiment 26, or the host cell(s) of embodiment 27 or 28, optionally in association with a further prophylactic and/or therapeutic agent.

[0435] 35. The method of embodiment 34, wherein the further prophylactic and/or therapeutic agent is selected from an antiviral agent; a vaccine specific for RSV; a vaccine specific for influenza virus; a vaccine specific for metapneumovirus (MPV); an siRNA specific for a RSV antigen; an siRNA specific for a MPV antigen; a second anti-RSV antibody; an anti-MPV antibody; an anti-IL4R antibody; an anti-influenza antibody; and a NSAID.

[0436] 36. The method of embodiment 34 or 35, wherein the subject is human, preferably an infant.

[0437] 37. A method of preventing or treating a Respiratory Syncytial Virus (RSV) infection in a human subject, comprising administering to the subject in need thereof an effective amount of the pharmaceutical composition of any one of embodiments 31 to 33.

[0438] 38. The method of embodiment 37, wherein the human subject is an infant.

[0439] 39. A method for detecting a Respiratory Syncytial Virus (RSV) infection in a subject, comprising obtaining a sample from the subject; contacting the sample with the anti-RSV F antibody of any one of embodiments 1 to 24; and detecting the presence of a complex between the anti-RSV F antibody and the RSV fusion glycoprotein (F), wherein detection of the complex indicates the presence of RSV.

[0440] 40. The method of embodiment 39, wherein the subject is a human, preferably an infant.

[0441] 41. An isolated antibody or antigen-binding polypeptide comprising a VH CDR3 having an amino acid sequence according to an antibody number in Table 9B.

[0442] 42. An isolated antibody or antigen-binding polypeptide comprising a VH CDR3 having an amino acid sequence according to an ADI listed in Table 8.

[0443] 43. An isolated antibody or antigen binding polypeptide characterized by ability to neutralize respiratory syncytial virus (RSV).

[0444] 44. An isolated antibody or antigen binding polypeptide characterized by high affinity binding to RSV F.

[0445] 45. An isolated antibody or antigen binding polypeptide characterized by high affinity binding to RSV prefusion F (preF).

[0446] 46. An isolated antibody having an amino acid sequence according to:

[0447] (i) Antibody Number 2, 71, 112, 217, 227, 228, 249, 466, 467, 469, 470, 832, 471, 516, 527, 532, 543, 544, 551, 554, 571, 578, 581, 592, 615, 641, 843, 868, or 870;

[0448] (ii) an Antibody Number of (i) with no more than 3 amino acid substitutions, additions, or deletions;

[0449] (iii) an Antibody Number of (i) with no more than 3, 2, or 1 amino acid substitution(s), addition(s), or deletion(s) in a CDR; or

[0450] (iv) an Antibody Number of (i) with no more than 3, 2, or 1 amino acid substitution(s), addition(s), or deletion(s) in CDRH3.

[0451] 47. An antibody or antigen-binding polypeptide according to any preceding embodiment having an IC₅₀ of less than 300 pM for neutralization of RSV.

[0452] 48. An antibody or antigen-binding polypeptide according to any preceding embodiment having an IC₅₀ of less than 200 pM for neutralization of RSV.

[0453] 49. An antibody or antigen-binding polypeptide according to any preceding embodiment having an IC₅₀ of less than 100 pM for neutralization of RSV.

[0454] 50. An antibody or antigen-binding polypeptide according to any preceding embodiment characterized by binding affinity to pre-F with a kD of less than 10 nM.

[0455] 51. An antibody or antigen-binding polypeptide according to any preceding embodiment characterized by a binding affinity to pre-F that is at least 10, 100, or 1000 fold greater than binding affinity to post-F.

[0456] 52. An antibody or antigen-binding polypeptide according to any preceding embodiment characterized by high affinity binding to RSV F site III.

[0457] 53. A nucleic acid molecule encoding an antibody or antigen binding protein according to any preceding embodiment.

[0458] 54. A vector comprising a nucleic acid molecule encoding an antibody or antigen binding protein according to any preceding embodiment.

[0459] 55. A cell comprising a vector according to claim 54.

The application's sequence listing, which the Patent Office published only in electronic form, follows.

SEQUENCE LISTING (1894 sequences)

SEQ ID NO: 1 - protein, 124 aa, Artificial Sequence
  Description of Artificial Sequence: Synthetic heavy chain variable region amino acid sequence
EVQLVETGGGLVKPGGSLRLSCADSGFPFSSYSMHWVRQAPGKGLEWVASISSSSSFINYADSVKGRFTISRDNAKNSLYLQMNSLRAEDTAVYFCAREAACGGDCYGYYFDYWGQGTLVTVSS

SEQ ID NO: 2 - protein, 111 aa, Artificial Sequence
  Description of Artificial Sequence: Synthetic light chain variable region amino acid sequence
QSVVTQPPSASGAPGQRVTISCTGSSSNIGAGYDVHWYQQLPGTAPKVLISGNSNRPSGVPARFSGSKSGTSASLAITGLQAEDEADYYCQSYDSSLSGSVFGGGTQLTVL

SEQ ID NO: 3 - protein, 122 aa, Artificial Sequence
  Description of Artificial Sequence: Synthetic heavy chain variable region amino acid sequence
EVQLVESGGGLVKPGGSLRLSCAASGVTVSSYYMTWVRQAPGKGLEFISDISSSSTYTNYADSVKGRFTISRDNAKSSLYLQMNNLRAEDTAVYYCARLGITVTGVGYFDLWGRGTLVTVSS

SEQ ID NO: 4 - protein, 111 aa, Artificial Sequence
  Description of Artificial Sequence: Synthetic light chain variable region amino acid sequence
QPGLTQPPSVSGAPGQRVTISCTGSSSNIGAGYDVHWYQQLPGTAPKLLIHDNNNRPSGVPDRFSGSKSGTSASLAITGLQVEDEADYYCQSYDSSLSNYVFGTGTKLTVL

SEQ ID NO: 5 - protein, 128 aa, Artificial Sequence
  Description of Artificial Sequence: Synthetic heavy chain variable region amino acid sequence
EVQLVESGGGLVQPGRSLRLSCTASGFTFGDYAMSWVRQAPGKGLEWVGFIRSNAFGGTSEYAASVKGRFTISRDDSKSIAYLQMNSLKTEDTAVYYCTRDGIHDYGDSYYYYGMDVWGQGTTVTVSS

SEQ ID NO: 6 - protein, 106 aa, Artificial Sequence
  Description of Artificial Sequence: Synthetic light chain variable region amino acid sequence
DIQLTQSPSSLSASVGDRVTITCRASQTVTTYLNWYQQKPGKAPKLLIYGASSLQSGVPSRFSGSGSGTDFTLTINSLQPEDFATYYCQQTYSTVTFGPGTKVEIK

SEQ ID NO: 7 - protein, 121 aa, Artificial Sequence
  Description of Artificial Sequence: Synthetic heavy chain variable region amino acid sequence
EVQLLESGGEVKKPGASVKVSCKASGYTFTNYGISWVRQAPGQGLEWMGWISAYNGNTNYAQKLQGRVTMTTDTSTSTAYMEVRRLRSDDTAVYYCAREPPVIAAGDFQHWGQGTLVTVSS

SEQ ID NO: 8 - protein, 112 aa, Artificial Sequence
  Description of Artificial Sequence: Synthetic light chain variable region amino acid sequence
DIVMTQTPLSLPVTLGQPASISCRSSQSLVHSDTNIYLSWFQQRPGQSPRRLIYKVSNRDSGVPDRFSGSGSGTDFTLRISRVEAEDVGVYYCMQGTHWPPDFGQGTRLEIK

SEQ ID NO: 9 - protein, 123 aa, Artificial Sequence
  Description of Artificial Sequence: Synthetic heavy chain variable region amino acid sequence
EVQLVESGGGLVKPGGSLRLSCAASGFTFSSYSMNWVRQAPGKGLEWVSSISSSSSYIYYADSVKGRFTISRDNAKNSLYLQMNSLRAEDTAVYYCAREYYDSSGYTNWFDPWGQGTLVTVSS

SEQ ID NO: 10 - protein, 110 aa, Artificial Sequence
  Description of Artificial Sequence: Synthetic light chain variable region amino acid sequence
QPVLTQPPSVSGAPGQRVTISCTGSSSNIGAGYDVHWYQQLPGTAPKLLIYGNSNRPSGVPDRFSGSKSGTSASLAITGLQAEDEADYYCQSYDSSLAWVFGGGTQLTVL

SEQ ID NO: 11 - protein, 126 aa, Artificial Sequence
  Description of Artificial Sequence: Synthetic heavy chain variable region amino acid sequence
EVQLVESGGGVVQPGRPLRLSCAASGFTFSTYDLYWVRQAPGKGLDWVAIISPDGNKKYYADSVKGRFTISRDNSKNTLFLHMNSLRAEDTAVYYCARDYGNYFGSGSYYRYFDLWGRGTLVTVSS

SEQ ID NO: 12 - protein, 107 aa, Artificial Sequence
  Description of Artificial Sequence: Synthetic light chain variable region amino acid sequence
DIQLTQSPSSLSASVGDRVTITCRASQSISSHLNWYQQKPGKAPKLLIYASSSLQSGVPSRFSGSGSGTDFTLTISGLQPEDFATYYCQQSYSTPFTFGPGTKVEIK

SEQ ID NO: 13 - protein, 120 aa, Artificial Sequence
  Description of Artificial Sequence: Synthetic heavy chain variable region amino acid sequence
QVQLVESGGGVLQPGRSLRLPCEASGFTFNKYAMHWVRQAPGKGLEWVAAVSYDGGNKFYAESVKGRFTISRDNSKNTLYLQMNSLKPEDTAVYYCARDRWELLHGLDYWGLGTLVTVSS

SEQ ID NO: 14 - protein, 107 aa, Artificial Sequence
  Description of Artificial Sequence: Synthetic light chain variable region amino acid sequence
SYELTQPPSVSVSPGQTARITCSGEALAKQYAYWYQQKPGQAPVLVIYKDNERPSGISERFSGSSSGTTVTLTISGVQAEDEADYYCQSADSSGTYVFGTGTKVTVL

SEQ ID NO: 15 - protein, 123 aa, Artificial Sequence
  Description of Artificial Sequence: Synthetic heavy chain variable region amino acid sequence
EVQLVESGGGLVKPGGSLRLSCAASGFTLSSYTMNWVRQAPGRGLEWVSSIYSTSSYIYYADSVKGRFTISRDNAKNSLYLQMNSLRAEDTAVYYCARDSQAVTGTDLYFDSWGQGTLVTVSS

SEQ ID NO: 16 - protein, 108 aa, Artificial Sequence
  Description of Artificial Sequence: Synthetic light chain variable region amino acid sequence
QPGLTQPPSVSVAPGKTARITCGGNNIGRKNVHWYQQKPGQAPILVIYYDSDRPSGIPERFSGSNSGNTATLTISRVEDGDEADYYCQVWDSSNDHVIFGGGTQLTVL

SEQ ID NO: 17 - protein, 120 aa, Artificial Sequence
  Description of Artificial Sequence: Synthetic heavy chain variable region amino acid sequence
QVQLVQSGGGLVQPGGSLRLSCAGSGFTFSDYEMNWVRQAPGKGLEWLSYISSSGSIIYYADSVKGRFTISRDNAKNSLYLQMNSLRAEDTGLYYCARANHRHYYGMDVWGQGTTVTVSS

SEQ ID NO: 18 - protein, 107 aa, Artificial Sequence
  Description of Artificial Sequence: Synthetic light chain variable region amino acid sequence
DIRLTQSPSTLSASVGDRVTITCRASQSIGSWLAWYQQKPGKAPKLLIYKASSLESGVPSRFSGSGSGTEFTLTISSLQPDDFATYYCQQYNSYSYTFGRGTRLEIK

SEQ ID NO: 19 - protein, 126 aa, Artificial Sequence
  Description of Artificial Sequence: Synthetic heavy chain variable region amino acid sequence
QVTLKESGPVLVKPTETLTLTCTVSGFSLSNAKMGVSWIRQPPGKALEWLAYISSNDEKSYSTSLKSRLTISKDTSKSQVVLTMTNMDPVDTATYYCARILLYDSSGYYLWYFDLWGRGTLVTVSS

SEQ ID NO: 20 - protein, 107 aa, Artificial Sequence
  Description of Artificial Sequence: Synthetic light chain variable region amino acid sequence
DIQVTQSPSSLSASVGDRVTITCRASQRITSYLNWYQHKPGKAPKLLIFAASSLHSGVPSTFSGSGSGTDFTLTISSLQPEDFATYYCQQSYSTPWTFGQGTKVEIK

SEQ ID NO: 21 - protein, 121 aa, Artificial Sequence
  Description of Artificial Sequence: Synthetic heavy chain variable region amino acid sequence
QVQLVQSGAEVKKPGSSVKVSCKASGGTFSSYGVNWVRQAPGQGLEWMGRIIPMFGTSNYAQKFQGRVTITADGSTSTAYMELSSLRSEDTAVYYCARVGSPTTGAIMGVWGQGTTVTVSS

SEQ ID NO: 22 - protein, 112 aa, Artificial Sequence
  Description of Artificial Sequence: Synthetic light chain variable region amino acid sequence
DIVLTQTPLSLPVTPGEPASISCRSSQSLLQSNGFNYLDWYLQKPGQSPKLLIYMGSNRASGVPDRFSGSGSGTDFTLIISRVEAEDVGVYYCMQAIESPLTFGGGTKVDIK

SEQ ID NO: 23 - protein, 124 aa, Artificial Sequence
  Description of Artificial Sequence: Synthetic heavy chain variable region amino acid sequence
QVQLVQSGGGLVQPGGSLRLSCAASGFTFRTYALSWVRQAPGKGLEWVSSILGSGGSTYYADSVKGRFTISRDNSKNTLYLQLNSLRAEDTAVYFCAKLAVAGLLHHYYGLDVWGQGTTVTVSS

SEQ ID NO: 24 - protein, 108 aa, Artificial Sequence
  Description of Artificial Sequence: Synthetic light chain variable region amino acid sequence
SYELTQPPSVSVSPGQTASITCSGDKLENKYACWYQQKPGQSPVLLIYQDTKRPSGIPERFSGSNSGTTATLTISGTQALDEADYYCQAWDSSTASVLFGGGTQLTVL

SEQ ID NO: 25 - protein, 118 aa, Artificial Sequence
  Description of Artificial Sequence: Synthetic heavy chain variable region amino acid sequence
QITLKESGAEVKKPGASVKVSCKVSGYTLSDFSMHWVRQAPGKGLEWMGSFDPEDGETVDAQKFQGRVTMTEDRSTATAYMELRSLRSEDTAVYYCGTPASAGQVDYWGQGTLVTVSS

SEQ ID NO: 26 - protein, 107 aa, Artificial Sequence
  Description of Artificial Sequence: Synthetic light chain variable region amino acid sequence
DIVLTQSPSSLSASVGDRVTITCRASQSISSYLHWYQQKPGKAPKLLIYAASSLQSGVPSRFSGSGSGTDFTLTISSLQPEDFATYYCQQSYITPYTFGQGTKLEIK

SEQ ID NO: 27 - protein, 124 aa, Artificial Sequence
  Description of Artificial Sequence: Synthetic heavy chain variable region amino acid sequence
EVQLLESGGGLVKPGGSLRLSCAASGFRFSSYSMNWVRQAPGKWLEWVSSISASSSYTDYADSVKGRFTISRDNAKNSLYLQMNSLRAEDTAVYYCAREDYLSSGSLLHWFDPWGQGTLVTVSS

SEQ ID NO: 28 - protein, 110 aa, Artificial Sequence
  Description of Artificial Sequence: Synthetic light chain variable region amino acid sequence
QPVLTQPPSVSGAPGQRVTISCTGSSSNIGAGYDVHWYQQLPGTAPKLLIYGNNNRPSGVPDRFSGSKSGTSASLAITGLQAEDEADYYCQSYDSRLSVLFGGGTKVTVL

SEQ ID NO: 29 - protein, 122 aa, Artificial Sequence
  Description of Artificial Sequence: Synthetic heavy chain variable region amino acid sequence
EVQLVESGGGLVKPGGSLRLSCAASGFTFRDYYMNWIRQAPGKGLEWVSDISASSSYTNYADSVKGRFTISRDNAKTSLYLQMNSLRAEDTAVYYCAREVVTAMGGYYFDYWGQGTLVTVSS

SEQ ID NO: 30 - protein, 112 aa, Artificial Sequence
  Description of Artificial Sequence: Synthetic light chain variable region amino acid sequence
QSVVTQPPSVSGAPGQRVTISCTGSSSNIGAGYDVHWYQQLPGTAPKLLIYGNNNRPSGVPDRFSGSKSGTSASLAITGLQAEDEADYYCQSYDSSLSGSGVFGTGTKVTVL

SEQ ID NO: 31 - protein, 120 aa, Artificial Sequence
  Description of Artificial Sequence: Synthetic heavy chain variable region amino acid sequence
QVQLVESGGGVAQPGGSLRLSCVASGFTFSNYGMHWVRQAPGKGLEWVAFIRSDGSKKYYGDSGKGRFTISRDNSKNTLYLQMNSLRAEDTALYYCARERAGATFAFDIWGQGTTVTVSS

SEQ ID NO: 32 - protein, 111 aa, Artificial Sequence
  Description of Artificial Sequence: Synthetic light chain variable region amino acid sequence
QSALTQPRSVSGSPGQSVTISCTGTSSDVGGYNFVSWYQHHPGKAPKLMIYDVTNRPSGVPDRFSGSKSGNTASLTISGLQADDEADYYCCSYAGGFTFYVFGTGTKVTVL

SEQ ID NO: 33 - protein, 121 aa, Artificial Sequence
  Description of Artificial Sequence: Synthetic heavy chain variable region amino acid sequence
EVQLVESGAEVKKPGSSVKVSCKASGGTLSSYAFSWVRQAPGQGLEWMGGVIPISATSDYAQKFQGRVTITADESTSTVYMELRSLRSEDTAVYYCARDTRYSSGWFYDYWGQGTLVTVSS

SEQ ID NO: 34 - protein, 113 aa, Artificial Sequence
  Description of Artificial Sequence: Synthetic light chain variable region amino acid sequence
DIRLTQSPDSLAVSLGERATINCKSSQSVLYSSNNKNYLAWYQQKPGQPPNLLIYWASTRDSGVPDRFSGSGSGTDFTLTISRLQAEDVAVYYCQQYYSTPYTFGQGTKLEIK

SEQ ID NO: 35 - protein, 131 aa, Artificial Sequence
  Description of Artificial Sequence: Synthetic heavy chain variable region amino acid sequence
EVQLVESGPGLVKPSETLSLTCTVSGDSVSNNNYYWNWIRQSPGKGLEWIGYIYYSGSTDYNPSLKSRVTISVDTSKNQFSLNLRSVTAADTAIYFCASAPWGMFTILGVVPSYYYGMDVWGQGTTVTVSS

SEQ ID NO: 36 - protein, 111 aa, Artificial Sequence
  Description of Artificial Sequence: Synthetic light chain variable region amino acid sequence
QSVLTQPPSVSGAPGQRVTISCTGSSSNIGAGYDVHWYQQLPGTAPKLLIYGSSNRPSGVPDRFSGSRSGTSASLAITGLQAEDEADYYCQSYDGSLGVYVFATGTKVTVL

SEQ ID NO: 37 - protein, 122 aa, Artificial Sequence
  Description of Artificial Sequence: Synthetic heavy chain variable region amino acid sequence
EVQLLESGGGLVQPGGSLRLSCSASGFTFSTYWMHWVRQAPGKGLVWVSRINGDGNDRNYADSVKGRFTISRDNAKNTVYLQMNSLRAEDTAVYYCARGGATGDFYFGMDVWGQGTTVTVSS

SEQ ID NO: 38 - protein, 110 aa, Artificial Sequence
  Description of Artificial Sequence: Synthetic light chain variable region amino acid sequence
SYELTQPPSVSVAPGKTAKITCGGNNIGTKSVHWYQQKPGQAPVLVIYYDTDRPSGIPERFSGSNSGNTATLTISRVEAGDEADYYCQVWDSSNSDHVGVFGGGTQLTVL

SEQ ID NO: 39 - protein, 123 aa, Artificial Sequence
  Description of Artificial Sequence: Synthetic heavy chain variable region amino acid sequence
EVQLLETGPGLVKPSQTLSLICAVSGGSISSGGYSWSWIRQPPGKGLEWVGYISYSGSTYYNPSLKSRVTISVDTSKNQFSLKLNSVTAADTAVYFCARVDGIYSSGMRFDYWGQGTLVTVSS

SEQ ID NO: 40 - protein, 107 aa, Artificial Sequence
  Description of Artificial Sequence: Synthetic light chain variable region amino acid sequence
DIQLTQSPGTLSLSPGERATLSCRASQSVSSYYLAWYQQKPGQAPRLLIYGTSSRATGIPDRFSGSGSGTDFTLTISRLEPEDFAVYYCQQYGRSPLFGQGTRLEIK

SEQ ID NO: 41 - protein, 119 aa, Artificial Sequence
  Description of Artificial Sequence: Synthetic heavy chain variable region amino acid sequence
QVQLVQSGAEVKKPGSSVKVSCKASGGTFSSYTISWVRQAPGQGLEWMGRIKPIIGIANNAQRFKGRVTITAEKSTGTAYMELSSLTSEDTAVYYCARGGYDYYGMDVWGQGTTVTVSS

SEQ ID NO: 42 - protein, 111 aa, Artificial Sequence
  Description of Artificial Sequence: Synthetic light chain variable region amino acid sequence
QSALTQPASVSGSPGQSITISCTGTSSDVGGYNYVSWHQQHPGKAPKLLIYDVSNRPSGVSNRFSGSKSGNTASLSISGLQAEDEADYYCSSFTSTSTPYVFGTGTQLTVL

SEQ ID NO: 43 - protein, 123 aa, Artificial Sequence
  Description of Artificial Sequence: Synthetic heavy chain variable region amino acid sequence
QVQLVQSGAEVKKPGSSAKVSCKASGGTFSSYTISWVRQAPGQGLEWMGRIIPFLGIANYAQKFQGRVTFTADKSTSTVYMDLSRLRSEDTALYYCAREPMYYGGDSYAFDVWGQGTTVTVSS

SEQ ID NO: 44 - protein, 110 aa, Artificial Sequence
  Description of Artificial Sequence: Synthetic light chain variable region amino acid sequence
QSVLTQPASMSGSPGHSITISCTGTSSDVGAYNYVSWYQQHPGKAPKLMIYDVSNRPSGVSSRFSGSKSGNTASLTISGLQPEDEADYYCSSFTTSSTRVFGTGTKLTVL

SEQ ID NO: 45 - protein, 122 aa, Artificial Sequence
  Description of Artificial Sequence: Synthetic heavy chain variable region amino acid sequence
EVQLVESGPTLVKPTQTLTLTCTFSGFSLSTSGVGVGWIRQPPGKALEWLAVIYWDDDKTYSPSLKSRLTITKDTSKNQVVLTMTNMNPVDTATYYCARCPAPVYSYGVDVWGQGTTVTVSS

SEQ ID NO: 46 - protein, 111 aa, Artificial Sequence
  Description of Artificial Sequence: Synthetic light chain variable region amino acid sequence
QSALTQPASVSGSPGQSITISCTATSSDFGGYDYVSWYQQHPGEAPKLMISDVTNRPSGVSNRFSGSKSGNTASLTISGLQAEDEADYYCSSYTSYTTPYVFGTGTKLTVL

SEQ ID NO: 47 - protein, 130 aa, Artificial Sequence
  Description of Artificial Sequence: Synthetic heavy chain variable region amino acid sequence
QVQLQESGAGLLKPSETLSLTCAVYGGSFSGYYWSWIRQPPGKGLEWIGEINHSGSTNYNPSLKSRVTISVDTSKNQFSLKLSSVTAADTAVYYCARDQRIVVVGAATEPYYYYYGMDVWGQGTTVTVSS

SEQ ID NO: 48 - protein, 108 aa, Artificial Sequence
  Description of Artificial Sequence: Synthetic light chain variable region amino acid sequence
QPVLTQPPSVSVSPGQTARITCSGDALPKQYAYWYQQKPGQAPVLVIYKDSERPSGIPERFSGSSSGTTVTLTISGVQAEDEADYYCQSADSSGTYRVFGGGTKLTVL

SEQ ID NO: 49 - protein, 129 aa, Artificial Sequence
  Description of Artificial Sequence: Synthetic heavy chain variable region amino acid sequence
EVQLVESGGGVVQPGRSLRLSCAASGFTFSNYAMHWVRQAPGKGLEWVSIISYDGSNKYYADSVKGRFTISRDNSKNTLYLQINSLRTEDTAVYYCARARKRIPIVVVTAPYYYGMDVWGQGTTVTVSS

SEQ ID NO: 50 - protein, 107 aa, Artificial Sequence
  Description of Artificial Sequence: Synthetic light chain variable region amino acid sequence
DIRVTQSPSSLSASVGDRVTITCRASQSISSYLHWYQQQPGKAPNLLIYAASNLQSGVPSRFSGSGSGTDFTLTISSLQPEDFATYYCQQSYTTPHTFGQGTKVEIK

SEQ ID NO: 51 - protein, 118 aa, Artificial Sequence
  Description of Artificial Sequence: Synthetic heavy chain variable region amino acid sequence
QVQLVQSGGGLVKPGGSLRLSCVASGFTFSDYYMTWIRQAPGKGLEWVSYISGSSAYTIYADSVKGRFTISRDNAKNSLYLQMNGLRAEDTAVYYCARVSWVRSLDSWGQGTLVTVSS

SEQ ID NO: 52 - protein, 110 aa, Artificial Sequence
  Description of Artificial Sequence: Synthetic light chain variable region amino acid sequence
QSALTQPASVSGSPGQSITISCTGSTSDVGLYNYVSWYQLHPGKAPKLIIYDVRHRPSGVSDRFSASKSGNTASLTISGLQAEDEADYYCCSYTSSSTYVFGSGTQLTVL

SEQ ID NO: 53 - protein, 126 aa, Artificial Sequence
  Description of Artificial Sequence: Synthetic heavy chain variable region amino acid sequence
QVQLVQSGPALVKPTQTLTLTCTFSGFSLSTSGMCVSWIRQPPGKALEWLARIDWDDDKYYSTSLKTRLTISKDTSKNQVVLTMTNMDPVDTATYYCARATNYDSSGYYSLYFDYWGQGTLVTVSS

SEQ ID NO: 54 - protein, 107 aa, Artificial Sequence
  Description of Artificial Sequence: Synthetic light chain variable region amino acid sequence
DIQMTQSPSSLSASVGDRVTITCRASQSISSYLNWYQQKPGKAPKLLIYAASSLQSGVPSRFSGSGSGTDFTLTISSLQPEDFATYYCQQSYSTPYTFGQGTKVEIK

SEQ ID NO: 55 - protein, 123 aa, Artificial Sequence
  Description of Artificial Sequence: Synthetic heavy chain variable region amino acid sequence
QVQLVQSGAEVKKPGASVKVSCKASGYTFTTYSMHWVRQAPGQRLEWMGWINAGNGNTKYSQKFQGRVTITRDTSASTAYMELSSLRSEDTAVYYCARDGVGGAYYYGEMDVWGQGTTVTVSS

SEQ ID NO: 56 - protein, 113 aa, Artificial Sequence
  Description of Artificial Sequence: Synthetic light chain variable region amino acid sequence
EIVLTQSPLSLPVTPGEPASISCRSSQSLLHSNGYNYLDWYLQKPGQSPQLLIYLGSNRASGVPDRFSGSGSGTDFTLKISRVEAEDVGVYYCMQALQTPRFTFGPGTKVEIK

SEQ ID NO: 57 - protein, 120 aa, Artificial Sequence
  Description of Artificial Sequence: Synthetic heavy chain variable region amino acid sequence
EVQLLESGGGFVQPGGSLRLSCAASGFTFSSYAVNWVRQAPGKGLEWVSLISGSGRTDYTDSVKGRFTISRDNAKNTLFLQMNSLRVEDTAVYYCAKSWGSSGYGYLDYWGQGTLVTVSS

SEQ ID NO: 58 - protein, 111 aa, Artificial Sequence
  Description of Artificial Sequence: Synthetic light chain variable region amino acid sequence
QSGLTQPPSVSGAPGQRVTISCTGSSSNIGPGTDVHWYQHFPGTAPKLLIFGNSNRPSGVPDRFSGSKSGTSASLAITGLQAEDEAYYYCQSYDRTLSASVFGGGTKLTVL

SEQ ID NO: 59 - protein, 122 aa, Artificial Sequence
  Description of Artificial Sequence: Synthetic heavy chain variable region amino acid sequence
EVQLLESGGGLVQPGGSLRLSCAASGFTFSSYAMSWVRQAPGKGLEWVSGISGSGGSTYYADSVKGRFTISRDNSKNTLYLEMNSLRAEDTAVYYCAKRYYYGSGTYTFDIWGQGTMVTVSS

SEQ ID NO: 60 - protein, 107 aa, Artificial Sequence
  Description of Artificial Sequence: Synthetic light chain variable region amino acid sequence
DIRLTQSPSSLSASVGDRVTITCRASQSIISYLNWYQQKPGKAPKLLIYAASSLQSGVPSRFSGSGSGTDFTLTISSLQPEDFATYYCQQSYSTPYTFGQGTKVEIK

SEQ ID NO: 61 - protein, 124 aa, Artificial Sequence
  Description of Artificial Sequence: Synthetic heavy chain variable region amino acid sequence
QVQLVESGGGLVKPGGSLRLSCAASGFTFSDYYMSWIRQAPGKGLEWVSYISGGGTYTKYADSVKGRFTISRDNAKNSVYLQMNSLRAEDTAVYYCARDVALVGWELRYGMDVWGQGTTVTVSS

SEQ ID NO: 62 - protein, 108 aa, Artificial Sequence
  Description of Artificial Sequence: Synthetic light chain variable region amino acid sequence
ETTLTQSPGTLSLSPGERATLSCRARENVNSSYLAWYQQKPGQAPRLLIYGASSRATGIPDRFSGSGSGTDFTLTISRLEPEDFAVYYCQQYAISPWTFGQGTKVEIK

SEQ ID NO: 63 - protein, 127 aa, Artificial Sequence
  Description of Artificial Sequence: Synthetic heavy chain variable region amino acid sequence
QVQLVQSGAEVKKPGESLKISCKGSGYSFTSHWIGWVRQMPGKGLEWMGITDPGDSDTRYSPSFQGQVTISADKSISTAYLQWSSLKASDTAMYYCAREPRRWMTTETNGPYYFDNWGQGTLVTVSS

SEQ ID NO: 64 - protein, 108 aa, Artificial Sequence
  Description of Artificial Sequence: Synthetic light chain variable region amino acid sequence
SYVLTQPPSVSVAPGKTARITCGGNNIGSKSVHWYQQKPGQAPVLVIYYDSDRPSGIPERFSGSNSGNTATLTISRVEAGDEADYYCQVWDSSSDNRVFGGGTKVTVL

SEQ ID NO: 65 - protein, 118 aa, Artificial Sequence
  Description of Artificial Sequence: Synthetic heavy chain variable region amino acid sequence
QVQLVQSGAEVKKPGASVKVSCKVSGYTLTKLSMHWVRQAPGKGLEWMGFFDPEDGDTLYAQKFQGRVTMTEDTSSDTPYMELRSLRSEDTAVYYCASPAAAGQFDYWGQGTLVTVSS

SEQ ID NO: 66 - protein, 107 aa, Artificial Sequence
  Description of Artificial Sequence: Synthetic light chain variable region amino acid sequence
DIVMTQSPSSLSASVGDRVTITCRASQFISSYLHWYQQKTGKAPKLLIYAASSLQSGVPSRFSGSGSGTDFTLTISSLQPEDFATYYCQQSYNTPRTFGQGTKLEIK

SEQ ID NO: 67 - protein, 123 aa, Artificial Sequence
  Description of Artificial Sequence: Synthetic heavy chain variable region amino acid sequence
QVQLVQSGTEVKKPGASVKVSCKASGYTFNMYGVSWVRQAPGQGLEWMGWISAYNGNTNYAQKFQGRVTMTIDTSTTTAYMELRSLRSDDTAMYYCARDFQAEEPLSNWFDPWGQGTLVTVSS

SEQ ID NO: 68 - protein, 107 aa, Artificial Sequence
  Description of Artificial Sequence: Synthetic light chain variable region amino acid sequence
DIVMTQTPSSLSASVGDRVIITCRASQSISRYINWYQKKPGKAPKFLIYAVSSLGSGVPSRFSGSGSGTDFTLTISSLQPEDFATYYCQQSYSTPFTFGPGTKVDIK

SEQ ID NO: 69 - protein, 125 aa, Artificial Sequence
  Description of Artificial Sequence: Synthetic heavy chain variable region amino acid sequence
EVQLLESGGGLVQPGGSLRLSCAASGFTFGSYDMNWVRQAPGKGLEWVSGISGSGDATYYADSVKGRFTISRDNSKNMLYLQMNSLSAEDMAVYYCARDRAFTMKYNSNWYKIYWGQGTMVTVSS

SEQ ID NO: 70 - protein, 108 aa, Artificial Sequence
  Description of Artificial Sequence: Synthetic light chain variable region amino acid sequence
EIVLTQSPGTLSLSPGERATLSCRASQSVTSSYLAWYQQKPGQAPRLLIYGAFSRATGIPDRFSGSGSGTDFTLTISRLEPEDFAVYYCHHYGTSRWTFGQGTKVDIK

SEQ ID NO: 71 - protein, 127 aa, Artificial Sequence
  Description of Artificial Sequence: Synthetic heavy chain variable region amino acid sequence
EVQLVESGGGLVKPGGSLRLSCAASGFTFINAWMSWVRQAPGKGLEWVGRIKSKADGGTTDDAAPVKGRFTISRDDSKNTLYLQMNSLKIEDTAVYYCATDVLPLYNWNLGWNFDLWGRGTLVTVSS

SEQ ID NO: 72 - protein, 108 aa, Artificial Sequence
  Description of Artificial Sequence: Synthetic light chain variable region amino acid sequence
SYVLTQPPSVSVAPGKTARITCGGNNIADKSVHWYQQKPGQAPVLVMYYDTDRPSGIPERFSGFNSGNTATLTISRVEAGDEADYYCQVWDSSSDHVVFGGGTKVTVL

SEQ ID NO: 73 - protein, 131 aa, Artificial Sequence
  Description of Artificial Sequence: Synthetic heavy chain variable region amino acid sequence
QVQLVQSGAEVKKPGSSVKVSCKASGGTFSSNAISWVRQAPGQGLEWMGGIIPIFATANYAQNFQDRVTITADESTGTAYMELSSLRYEDTAVYYCAKSAIHSGYHGPARSGFYQNGMDVWGQGTTVTVSS

SEQ ID NO: 74 - protein, 110 aa, Artificial Sequence
  Description of Artificial Sequence: Synthetic light chain variable region amino acid sequence
SYELTQPPSASGTPGQRVTISCSGSSSNIGINPVNWYQHFPGTAPKLLIYRNNQRPSGVPDRFSGSKSGTSASLAISGLQSEDEAVYYCAAWDDRLNGPVFGGGTQLTVL

SEQ ID NO: 75 - protein, 123 aa, Artificial Sequence
  Description of Artificial Sequence: Synthetic heavy chain variable region amino acid sequence
EVQLVESGGGVVQPGKSLRLSCAASGFSFSTFAMHWVRQAPGKGLEWVAVISYDGSNKFYADSVKGRFTISRDSSKNTLYLQMNSLRAEDTAVYYCARGGYSSGWYVTHFDYWGQGTLVTVSS

SEQ ID NO: 76 - protein, 111 aa, Artificial Sequence
  Description of Artificial Sequence: Synthetic light chain variable region amino acid sequence
QSVLTQPPSASGSPGQSVTISCTGTSSDVGGYNYVSWYQQHPGKAPKLMIYEVSKRPSGVPDRFSGSKSGNTASLTVSGLQAEDEADYYCSSYAGSNNLYVFGTGTKLTVL

SEQ ID NO: 77 - protein, 122 aa, Artificial Sequence
  Description of Artificial Sequence: Synthetic heavy chain variable region amino acid sequence
EVQLVESGGGLVQPGGSLRLSCAASGFTFSNYAMTWVRQAPGKGLEWLSSISGSGGSTYYADSVKGRFTISRDNSRNTLYVQMNSLRVEDTAFYYCAKAFYEYGAGSPGDYWGQGTLVTVSS

SEQ ID NO: 78 - protein, 108 aa, Artificial Sequence
  Description of Artificial Sequence: Synthetic light chain variable region amino acid sequence
DIQLTQSPSSLSASVGDRVTITCRASQSIGTNLNWYQQKPGKAPKFLIYAASSLQRGVPSRFSGSGSGSEFTLTISSLQPEDFATYYCQQSYSTLPITFGQGTKLEIK

SEQ ID NO: 79 - protein, 121 aa, Artificial Sequence
  Description of Artificial Sequence: Synthetic heavy chain variable region amino acid sequence
QVQLLESGGGLVQPGGSLRLSCAASGFTFSNYAMGWVRQAPGQGLEWVSRISATGGSTHYADSVRGRFTISRDNSKNTLYLQMNSLKAEDTAVYYCAKDRGYSRNLTPDYWGQGTLVTVSS

SEQ ID NO: 80 - protein, 107 aa, Artificial Sequence
  Description of Artificial Sequence: Synthetic light chain variable region amino acid sequence
ETTLTQSPSSLSASVGDRVTITCRASQGITNDLGWYQKKPGKAPKLLIYVASSLQSGVPSRFSGSGSGTDFTLTISSLQPEDFATYYCLQDYNYPITFGQGTKVDIK

SEQ ID NO: 81 - protein, 126 aa, Artificial Sequence
  Description of Artificial Sequence: Synthetic heavy chain variable region amino acid sequence
QVQLQQWGAGLLKPSETLSLTCAVYGGSFSGSYWSWIRQPPGKGLEWIGEINHSGSTSYNPSLKSRVTISVDTSKKQFSLKLSSMTAADTAVYYCAGGFYYDSSGSYAPHPTFDYWGQGTLVTVSS

SEQ ID NO: 82 - protein, 107 aa, Artificial Sequence
  Description of Artificial Sequence: Synthetic light chain variable region amino acid sequence
DIVMTQTPATLSVSPGERATLSCRASQSVSSNLAWYQQKPGQAPRLLIYGASTRATGIPARFSGSGSGTEFTLTISSLQSEDFAVYYCQQYNNWPRTFGQGTKVEIK

SEQ ID NO: 83 - protein, 122 aa, Artificial Sequence
  Description of Artificial Sequence: Synthetic heavy chain variable region amino acid sequence
QVQLVQSGGVVVQPGGSLRLSCAASGFNFDDFTMHWVRQAPGKGLEWVSLITWDGGITYYADSVKGRFTISRDNGKNSLYLRMNSLRTEDTALYYCAKDGDRYSGYAFLDYWGQGTLVTVSS

SEQ ID NO: 84 - protein, 108 aa, Artificial Sequence
  Description of Artificial Sequence: Synthetic light chain variable region amino acid sequence
SYELTQPPSVSVAPGKTARLTCGGNNIGSESVHWYQQRPGQAPVLVSYYNGDRPSGIAERISASKSGNTATLTIYRVEAGDEADYYCQVWHSSSDHFVFGTGTQLTVL

SEQ ID NO: 85 - protein, 122 aa, Artificial Sequence
  Description of Artificial Sequence: Synthetic heavy chain variable region amino acid sequence
EVQLVESGGGLVQPGGSLRLSCAVSGFTFSNYAVSWVRQAPGKGLEWVSGISGSGGTTYYVDSVKGRFTVSRDNSKNTLFLQLNSLKAEDTAVYYCAKDWGYSGGRPYFDYWGQGTLVTVSS

SEQ ID NO: 86 - protein, 110 aa, Artificial Sequence
  Description of Artificial Sequence: Synthetic light chain variable region amino acid sequence
QSVLTQPPSVSGAPGQRVTISCTASSSNIGPIYDVHWYQQLPGTGPKLLIYGNNNRPSGVPDRFSGSKSGTSASLAITGLQAEDEADYYCQSYDTSLSVVFGGGTKLTVL

SEQ ID NO: 87 - protein, 120 aa, Artificial Sequence
  Description of Artificial Sequence: Synthetic heavy chain variable region amino acid sequence
EVQLVESGGGLVQPGGSLRLSCAASGFTFSSYWMHWVRQAPGKGPVWVSRINSDGSTTNYADYMKGRFTISRDNAKNTVYLQMNSLRAEDTAVYYCARDSDSYDDAFDIWGQGTTVTVSS

SEQ ID NO: 88 - protein, 108 aa, Artificial Sequence
  Description of Artificial Sequence: Synthetic light chain variable region amino acid sequence
SYELTQPPSVSVSPGQTARISCSGEALPKKYSYWYQQKSGQAPVLVIYEDSKRPSGIPERFSGSSSGTMATLTISGAQVEDEADYYCYSTDSSGNHRVFGGGTKVTVL

SEQ ID NO: 89 - protein, 122 aa, Artificial Sequence
  Description of Artificial Sequence: Synthetic heavy chain variable region amino acid sequence
EVQLVESGGGVVQPGGSLRLSCAVSGITFSSYGMHWVRQAPGKGLEWVAFIRYDGSNKYYGDSLRGRFTISRDNSKNTLYLQMNSLRAEDTAVYYCAKDAVGIGGYYGLDVWGQGTTVTVSS

SEQ ID NO: 90 - protein, 107 aa, Artificial Sequence
  Description of Artificial Sequence: Synthetic light chain variable region amino acid sequence
DIQMTQSPSSLSASVGDRVTITCRASQGIRNDLGWYQQKPGKAPKRLIYAASSLQSGVPSRFSGSGSGTEFTLTISSLQPEDFATYYCLQHNGYPWTFGQGTKVEIK

SEQ ID NO: 91 - protein, 122 aa, Artificial Sequence
  Description of Artificial Sequence: Synthetic heavy chain variable region amino acid sequence
QVQLVESGGGLVQPGGSLRLSCAASGFTFSSYWMHWVRQAPGKGLVWVSRINSDGSSPTYADSVKGRFTISRDNAKNTVFLQMNSLRAEDTAVYYCARESWELIRGDAFDIWGQGTTVTVSS

SEQ ID NO: 92 - protein, 107 aa, Artificial Sequence
  Description of Artificial Sequence: Synthetic light chain variable region amino acid sequence
DIQMTQSPSSLSASVGDRVTITCRASQSISSSLNWYQQKPGKAPNLLIYAASTLQSGVPSRFSGSGSGTDFTLTISSLQPEDFATYYCQQSYRTPRTFGQGTKVEIK

SEQ ID NO: 93 - protein, 126 aa, Artificial Sequence
  Description of Artificial Sequence: Synthetic heavy chain variable region amino acid sequence
EVQLLESGGGVVQPGRSLRLSCAASGFTFSSYAMHWVRQAPGKGLEWVAVIGNDGTNKYHADSVKGRFTISRDNSKNTLYLQMNSLRAEDTAVYYCARRRVGIMYSGSYWGGMDVWGQGTTVTVSS

SEQ ID NO: 94 - protein, 108 aa, Artificial Sequence
  Description of Artificial Sequence: Synthetic light chain variable region amino acid sequence
SYELTQPPSVSVSPGQTASITCSGDKLGGKYVSWYQQKPGQSPVLVMYQDTRRPSGIPERLSGSNSGSTATLTISATQAMDEADYYCQAWDITTVHVVFGGGTKLTVL

SEQ ID NO: 95 - protein, 121 aa, Artificial Sequence
  Description of Artificial Sequence: Synthetic heavy chain variable region amino acid sequence
QVQLVQSGAEVKKPGESLKISCKGSGYTFTSYWIGWVRQLPGKGLEWMGVIFPGDSDTRYSPSFQGQVTISADKSISTAYLQWSSLKAADTAMYYCARTRLGRGFYRFDSWGQGTLVTVSS

SEQ ID NO: 96 - protein, 111 aa, Artificial Sequence
  Description of Artificial Sequence: Synthetic light chain variable region amino acid sequence
QSVLTQPPSVSAAPGQKVTISCSGSSSNIGNNYVSWYQQLPGTAPRLLIYENNERPSGIPDRFSGSKSGTSATLGITGLQTGDEADYYCATWDSGLSAGYVFGTGTKLTVL

SEQ ID NO: 97 - protein, 129 aa, Artificial Sequence
  Description of Artificial Sequence: Synthetic heavy chain variable region amino acid sequence
EVQLVESGGGLVQPGGSLRLSCAASGFTFSSYSMNWVRQAPGKGLEWVSYIGSSSSSVYYGDSAKGRFTISRDNAKNSLYLQMNSLRDEDTALYYCARVGWLQYCRGGSCYASFGMDVWGQGTTVTVSS

SEQ ID NO: 98 - protein, 107 aa, Artificial Sequence
  Description of Artificial Sequence: Synthetic light chain variable region amino acid sequence
DIQMTQSPSSLSASVGDRVTITCRASQGIRNDLGWYQQKPGIAPKLLIYAASSLQSGVPSRFSGSGSGTDFTLTISSLQPEDFATYYCLQDYDSPYTFGQGTKLEIK

SEQ ID NO: 99 - protein, 119 aa, Artificial Sequence
  Description of Artificial Sequence: Synthetic heavy chain variable region amino acid sequence
EVQLLESGGGVVQPGRSLRLSCAASGFTFSAYGFHWVRQAPGKGLEWVAVIWFDGNNKYYADSMKGRFIISRDNSKNTLYLQMNSLRAEDTAVYYCARDPKETGEFDYWGQGTLVTVSS

SEQ ID NO: 100 - protein, 110 aa, Artificial Sequence
  Description of Artificial Sequence: Synthetic light chain variable region amino acid sequence
QSALTQPASVSGSPGQSITISCTGTISDVGRYNYVSWYQQHPGKAPKLMIYDVTNRPSGVSNRFSGSKSGNTASLTISGLQAEDEAVYYCCSYTISSTYVFGTGTKLTVL

SEQ ID NO: 101 - protein, 127 aa, Artificial Sequence
  Description of Artificial Sequence: Synthetic heavy chain variable region amino acid sequence
QITLKESGPTLVKPTQTLTLTCTFSGFSLSTSGVGVGWIRQPPGKALEWLALIYWDEDKRYSPSLKTRLTITKDTSRNQVKLTMTNMDPVDTATYYCAHQYYDILTGYPSPGAFDIWGQGTTVTVSS

SEQ ID NO: 102 - protein, 109 aa, Artificial Sequence
  Description of Artificial Sequence: Synthetic light chain variable region amino acid sequence
QPVLTQPASVSGSPGQSITISCTGTSSDVVSYNLVSWFQQHPGKAPKLMIYEVTRRPSGVSNRFSGSKSGNTASLTISGLQAEDEADYYCCAYTGTPVVFGGGTKLTVL

SEQ ID NO: 103 - protein, 121 aa, Artificial Sequence
  Description of Artificial Sequence: Synthetic heavy chain variable region amino acid sequence
QVQLQESGSGLVKPSQTLSLTCTVSGGSISSVGYSWSWIRQPPGKGLEWIGYIYHSGSPYYSPSLNSRVTISVDRSKNQFSLKLSSVTAADTAVYFCARVFFGGGGAFDIWGQGTTVTVSS

SEQ ID NO: 104 - protein, 109 aa, Artificial Sequence
  Description of Artificial Sequence: Synthetic light chain variable region amino acid sequence
QPGLTQPPSVSVAPGQTARITCGGNNIGSKSVQWYQQKPGQAPVLVMYYDSDRPSGIPDRFSGSSSGNTATLTITRVEAGDEADYSCQVWDSVNVHPVIFGGGTKLTVL

SEQ ID NO: 105 - protein, 118 aa, Artificial Sequence
  Description of Artificial Sequence: Synthetic heavy chain variable region amino acid sequence
QVQLVQSGAEVKKPGESLKISCKGSGYSFTSYWIGWVRQMPGKGLEWMGIIYPGDSDTRYSPSFQGQVTISADKSISTAYLQWSSLKASDTAMYYCASSSYSNYFDYWGQGTLVTVSS

SEQ ID NO: 106 - protein, 111 aa, Artificial Sequence
  Description of Artificial Sequence: Synthetic light chain variable region amino acid sequence
NFMLTQPHSVSESPGKTVTISCTRSSGSIASNYVQWYQQRPGSAPTTVIYEDNQRPSGVPDRFSGSIDSSSNSASLTISGLKTEDEADYYCQSYDSSNPWVFGGGTKLTVL

SEQ ID NO: 107 - protein, 125 aa, Artificial Sequence
  Description of Artificial Sequence: Synthetic heavy chain variable region amino acid sequence
EVQLVESGGGLVQPGGSLRLSCAASRFTFSSYAMSWVRQAPGKGLEWVSGIGASGGTTYYADSVKGRFTISRDNSKNTVYLQMNSLRAEDTAVYYCARCEYYYGSGSAGYYFDYWGQGTLVTVSS

SEQ ID NO: 108 - protein, 106 aa, Artificial Sequence
  Description of Artificial Sequence: Synthetic light chain variable region amino acid sequence
SYELTQPPSVSVSPGQTASITCSGDKLGSKFAFWYQQKPGQSPVLVIFQDVKRPSGIPERFSGSNSGNTATLTISGTQAMDEADYYCQAWDSGTAVFGGGTKVTVL

SEQ ID NO: 109 - protein, 118 aa, Artificial Sequence
  Description of Artificial Sequence: Synthetic heavy chain variable region amino acid sequence
EVQLVESGGGVVQPGRSLRLSCAASGFTFSSYPMHWVRQAPGKGLEWVAVISYDGSNKYYADSVKGRFTISRDNSKNTLYLQMNSLRAEDTAVYSCARAQSAAIFDHWGQGTLVTVSS

SEQ ID NO: 110 - protein, 110 aa, Artificial Sequence
  Description of Artificial Sequence: Synthetic light chain variable region amino acid sequence
QAVVTQEPSLTVSPGGTVTLTCASSTGAVTSGYYPNWFQQKPGQAPRALIYTTSKRHSWTPARFSGSLLGGKAALTLSGVQPEDEADYYCLLYYGGANWVFGGGTKLTVL

SEQ ID NO: 111 - protein, 124 aa, Artificial Sequence
  Description of Artificial Sequence: Synthetic heavy chain variable region amino acid sequence
EVQLVESGGGLVKPGGSLRLSCAASGFTFINAWMAWVRQAPGKGPEWVGRIKSRADGGTTDYAAPVKGRFTISRDDSKNRLFLQMDSLKTDDTAVYFCTTGVRALRFYNGMDVWGQGTTVTVSS

SEQ ID NO: 112 - protein, 106 aa, Artificial Sequence
  Description of Artificial Sequence: Synthetic light chain variable region amino acid sequence
ETTLTQSPSSLSASIGDRVTITCRAGQSISSFLNWYQQKPGKAPKLLIYAASTLQSGVPSRFSGSKSGTDFTLTISSLQPEDFATYYCQQSYHTFTFGPGTKVEIK

SEQ ID NO: 113 - protein, 130 aa, Artificial Sequence
  Description of Artificial Sequence: Synthetic heavy chain variable region amino acid sequence
QVQLVESGPGLVKPSETLSLTCAVSGYSISSGYYWGWIRQPPGKGLEWIGNIYHSGSTYYNPSLKSRVTISVDTSKNQFSLKLSSVTAADTAVYYCARATLRFTLVREVVVTACDAFDIWGQGTTVTVSS

SEQ ID NO: 114 - protein, 111 aa, Artificial Sequence
  Description of Artificial Sequence: Synthetic light chain variable region amino acid sequence
QSALTQPASVSGSPGQSITISCTGTSSDVGSYNLVSWYQQHPGKVPKLVIYEVNKRPSGVSNRFSGSKSGNTASLTISGLQAEDEADYYCCSYAGSSTFVVFGGGTKLTVL

SEQ ID NO: 115 - protein, 125 aa, Artificial Sequence
  Description of Artificial Sequence: Synthetic heavy chain variable region amino acid sequence
QVQLVESGGGLVQPGGSLRLSCAAAGFSFSNYAMSWVRQAPGKGLEWVAVISGNAGSTYYAESVKGRFTISRDNSKNTLHLQMNSLRGEDTAVYYCAKPPGIAVAGEYYWYFDLWGRGTLVTVSS

SEQ ID NO: 116 - protein, 108 aa, Artificial Sequence
  Description of Artificial Sequence: Synthetic light chain variable region amino acid sequence
QVQLMQPPSVSVSPGQTARITCSGDALPRENAYWYQQKSGQAPVLVIYEDSKRPSGIPERFSGSSSGTMATLTITGAQVEDEADYYCYSTDTSAYHWVFGGGTKLTVL

SEQ ID NO: 117 - protein, 122 aa, Artificial Sequence
  Description of Artificial Sequence: Synthetic heavy chain variable region amino acid sequence
EVQLLESGAEVKKPGSSVKVSCKASGGTFSSYGISWVRQAPGQGLEWMGGIIPIFGTSNYAQKFQGRVTITADESTSTAYMELSSLRSEDTAVYYCALDSSGRARYYAMDVWGQGTTVTVSS

SEQ ID NO: 118 - protein, 107 aa, Artificial Sequence
  Description of Artificial Sequence: Synthetic light chain variable region amino acid sequence
DIQVTQSPATLSLSPGERATLSCRASQSVSSYLAWYQQKPGQAPRLLIYDASNRATGIPARFSGSGSGTDFTLTISSLEPEDFAVYYCQQRNNWPPTFGPGTKVEIK

SEQ ID NO: 119 - protein, 122 aa, Artificial Sequence
  Description of Artificial Sequence: Synthetic heavy chain variable region amino acid sequence
QVQLVESGGGLVKPGGSLRLSCAASGFSFTGFYMNWVRQAPGKGLEWVSSISSSSTYKNYADSLQGRFTISRDNARSSLYLQMNSLRAEDTAVYYCARTRTEYTYGYYHDFWGQGTLVTVSS

SEQ ID NO: 120 - protein, 110 aa, Artificial Sequence
  Description of Artificial Sequence: Synthetic light chain variable region amino acid sequence
QPVLTQPPSVSGAPGQRVTISCTGSSSNIGAGYDVHWYQQVPGTAPKLLIYNNNNRPSGVPDRFSGSKSGTSASLAITGLQAEDEADYYCQSYDSRLSGVFGGGTKLTVL

SEQ ID NO: 121 - protein, 117 aa, Artificial Sequence
  Description of Artificial Sequence: Synthetic heavy chain variable region amino acid sequence
EVQLLESGGGLVKPGGSLRLSCAASGFTFSSYSMNWVRQAPGKGLEWVSSISSSSSYIYYADSVKGRFTISRDNAKNSLYLQMNSLRAEDTAVYYCARGSEYYFDYWGQGTLVTVSS

SEQ ID NO: 122 - protein, 110 aa, Artificial Sequence
  Description of Artificial Sequence: Synthetic light chain variable region amino acid sequence
QSVLTQPPSVSGAPGQRVTISCTGSSSNIGAGYDVHWYQQLPGTAPKLLIYGNSNRPSGVPDRFSGSKSGTSASLAITGLQAEDEADYYCQSYDSSLSVVFGGGTKVTVL

SEQ ID NO: 123 - protein, 126 aa, Artificial Sequence
  Description of Artificial Sequence: Synthetic heavy chain variable region amino acid sequence
EVQLVESGGGVVQPGRSLRLSCAASGFTFSSYAMHWVRQAPGKGLEWVAVISYDGSNKYYADSVKGRFTISRDNSKNTLYLQMNSLRAEDTAVYYCARDDTYYYDSSGYSAPFDYWGQGTLVTVSS

SEQ ID NO: 124 - protein, 107 aa, Artificial Sequence
  Description of Artificial Sequence: Synthetic light chain variable region amino acid sequence
DIQVTQSPSTLSASVGDRVTITCRASQSISSWLAWYQQKPGKAPKLLIYKASSLESGVPSRFSGSGSGTEFTLTISSLQPDDFATYYCQQYNSYPWTFGQGTKVEIK

SEQ ID NO: 125 - protein, 123 aa, Artificial Sequence
  Description of Artificial Sequence: Synthetic heavy chain variable region amino acid sequence
EVQLVESGGGVVQPGRSLRLSCAASGFTFSSYAMHWVRQAPGKGLEWVAVISYDGSNKYYADSVKGRFTISRDNSKNTLYLQMNSLRAEDTAVYYCARELRYFDWEYGGMDVWGQGTTVTVSS

SEQ ID NO: 126 - protein, 108 aa, Artificial Sequence
  Description of Artificial Sequence: Synthetic light chain variable region amino acid sequence
EIVLTQSPSSLSASVGDRVTITCQASQDISNYLNWYQQKPGKAPKLLIYDASNLETGVPSRFSGSGSGTDFTFTISSLQPEDIATYYCQQYDNLPMYTFGQGTKLEIK

SEQ ID NO: 127 - protein, 126 aa, Artificial Sequence
  Description of Artificial Sequence: Synthetic heavy chain variable region amino acid sequence
EVQLVESGGGVVQPGRSLRLSCAASGFTFSSYAMHWVRQAPGKGLEWVAVISYDGSNKYYADSVKGRFTISRDNSKNTLYLQMNSLRAEDTAVYYCARDDTYYYDSNGYSAPFDYWGQGTLVTVSS

SEQ ID NO: 128 - protein, 107 aa, Artificial Sequence
  Description of Artificial Sequence: Synthetic light chain variable region amino acid sequence
DIQVTQSPSTLSASVGDRVTITCRASQSISSWLAWYQQKPGKAPKLLIYKASSLESGVPSRFSGSGSGTEFTLTISSLQPDDFATYYCQQYNSYPWTFGQGTKVDIK

SEQ ID NO: 129 - protein, 131 aa, Artificial Sequence
  Description of Artificial Sequence: Synthetic heavy chain variable region amino acid sequence
EVQLLESGPGLVKPSQTLSLTCAVSGGSINSGRYSWSWIRQPPGKGLEWIGYIYYSGTTYYNPSLESRVTISRDTSKNQFSLNLSSVTAADTAVYYCARTNSADSYASGSHYIRPQYFDFWGQGTLVTVSS

SEQ ID NO: 130 - protein, 106 aa, Artificial Sequence
  Description of Artificial Sequence: Synthetic light chain variable region amino acid sequence
DIQLTQSPATLSLSPGERATLSCRASQSVSSYLAWYQQKPGQAPRLLIYGASNRATGIPARFSGSGSGTDFTLTISRLEPEDFAVYYCQQRSNWLTFGGGTKVEIK

SEQ ID NO: 131 - protein, 130 aa, Artificial Sequence
  Description of Artificial Sequence: Synthetic heavy chain variable region amino acid sequence
QVQLVQSGGGVVQPGRSLRLSSAASGFTFSSYAMHWVRQAPGKGLEWVAVISHDGSKYYADSVKGRFTISRDNSKSTLNLQMNSLRPEDTAVYYCARGGDVRLYDDSNGYHYDTYYFDYWGQGTLVTVSS

SEQ ID NO: 132 - protein, 107 aa, Artificial Sequence
  Description of Artificial Sequence: Synthetic light chain variable region amino acid sequence
EIVLTQSPSSLSASVGDRVTITCRASQGIRNDLGWYQQKPGKAPKLLIYAASTLQSGVPSRFSGSGSGTDFTLTISSLQPEDFATYYCLQDYNYPLTFGGGTKVEIK

SEQ ID NO: 133 - protein, 124 aa, Artificial Sequence
  Description of Artificial Sequence: Synthetic heavy chain variable region amino acid sequence
QVQLVQSGGGLVKPGGSLRLSCAASGFTFSSYSMHWVRQAPGKGLEWVSSISASSSYLNYADSVKGRFTISRDNAKKSLYLQLNTLRADDTAVYYCAREDHDSGTYYLNWFDPWGQGTLVTVSS

SEQ ID NO: 134 - protein, 111 aa, Artificial Sequence
  Description of Artificial Sequence: Synthetic light chain variable region amino acid sequence
QSVVTQPPSVSGAPGQRVTISCTGSSSNIGAGYDVHWYQQFPGTGPKLLIYGNSHRPSGVPDRFSGSKSGPSASLAITGLQAEDEADYYCQSYDSSLSGYVFGTGTKVTVL

SEQ ID NO: 135 - protein, 121 aa, Artificial Sequence
  Description of Artificial Sequence: Synthetic heavy chain variable region amino acid sequence
QVQLVQSGAEVKKPGASVKVSCKTSGYTFTNYGISWVRQAPGQGLEWMGWISAYNGNRNYAQKLQGRVTMTTDTSTSTAYMELRSLRSDDTAVYYCAREPPVIAAGDFSHWGQGTLVTVSS

SEQ ID NO: 136 - protein, 112 aa, Artificial Sequence
  Description of Artificial Sequence: Synthetic light chain variable region amino acid sequence
EIVLTQSPLSLPVTLGQPASISCRSSQSLVHSDANTYLSWFQQRPGQSPRRLIYKVSNRDSGVPDRFSGSGSGTDFTLKISRVEAEDVGVYYCMQGTHWPPDFGQGTRLEIK

SEQ ID NO: 137 - protein, 124 aa, Artificial Sequence
  Description of Artificial Sequence: Synthetic heavy chain variable region amino acid sequence
QVQLVESGGGLGKPGGSLRLSCAASGFTFSGYYMSWIRQAPGKGLEWVSDISSGSSFTNYADSVKGRFTISRDNAKNSLYLQMNSLKAEDTAVYYCARVPPDSYGSGSYSGDSWGQGTLVTVSS

SEQ ID NO: 138 - protein, 111 aa, Artificial Sequence
  Description of Artificial Sequence: Synthetic light chain variable region amino acid sequence
QSVVTQPPSVSGAPGQRVTISCTGSSSNIGAGYGVHWYQQLPGTAPKLLIYGNTNRPSGVPDRISGSKSGTSASLVITGLQAEDEADYYCQSYDSSLSGWVFGGGTKLTVL

SEQ ID NO: 139 - protein, 118 aa, Artificial Sequence
  Description of Artificial Sequence: Synthetic heavy chain variable region amino acid sequence
EVQLVESGGGLVQPGGSLRLSCAASGFTFSNFEMNWVRQAPGKGLEWVSYISSSGRIIYYADSVKGRFTISRDNARNSLYVQMNSLRVEDTAVYYCARAKAAAGHDLWGQGTLVTVSS

SEQ ID NO: 140 - protein, 107 aa, Artificial Sequence
  Description of Artificial Sequence: Synthetic light chain variable region amino acid sequence
EIVLTQSPSTLSASVGDRVTITCRASQSISPWLAWYQQKPGKAPKLLIYRASSLESGVPSRFSGSGSGTEFTLTISSLQPDDFATYYCQHYNSYLYTFGQGTKVEIK

SEQ ID NO: 141 - protein, 122 aa, Artificial Sequence
  Description of Artificial Sequence: Synthetic heavy chain variable region amino acid sequence
QVQLVQSGTEVKKPGASVKVSCKASGYTFTNYDISWVRQAPGQGLEWMGWISGSTGNTIYAQNLQGRLTMTTDTSTSTAYMELRSLRSDDTAIYYCARDNVGYASGNYFDYWGQGTLVTVSS

SEQ ID NO: 142 - protein, 108 aa, Artificial Sequence
  Description of Artificial Sequence: Synthetic light chain variable region amino acid sequence
SYVLTQPPSVSVAPGKTARIPCGGNNIGSKSVHWYQQRPGQAPVLVIYYDSVRPSGIPERFSGSNSGNTATLTISTVEAGDEADFYCQVWDSSRDHEVFGGGTKLTVL

SEQ ID NO: 143 - protein, 118 aa, Artificial Sequence
  Description of Artificial Sequence: Synthetic heavy chain variable region amino acid sequence
QVQLVQSGAEVKKPGESLKISCKGSGYKFTNYWIAWVRQMPGKGLEWLGVIYPGASDITYSPSFQGQVTISADKSISTAYLQWSSLKASDTAIYYCARQGSITAMSYWGQGTMVTVSS

SEQ ID NO: 144 - protein, 112 aa, Artificial Sequence
  Description of Artificial Sequence: Synthetic light chain variable region amino acid sequence
DIVMTQSPLSLPVTPGEPASISCRSSQSLLHSNGFNYLDWYLQKPGQSPQLLIYLGSNRASGVPDRFSGSGSGTDFTLKISRVEAEDVGVYYCMQALQTPFTFGPGTKVEIK

SEQ ID NO: 145 - protein, 130 aa, Artificial Sequence
  Description of Artificial Sequence: Synthetic heavy chain variable region amino acid sequence
QVQLVQSGGGVVQPGRSLRLSCAASGFTFSSYGMHWVRQAPGKGLEWVAVIWFDGNNKEYADSVKGRFAISRDNSKNTLYLQMNSLRAEDTAVYYCARDLIPVTIFGVVNPYSYYGMDVWGQGTTVTVSS

SEQ ID NO: 146 - protein, 107 aa, Artificial Sequence
  Description of Artificial Sequence: Synthetic light chain variable region amino acid sequence
EIVMTQSPSSLSASVGDRVTITCRASQSISTYLNWYQQKPGTAPKLLIYAASSLESGVPSRLSGSGSGTEFILTISSLQREDFATYYCQQSYSTPPTFGQGTKVEIK

SEQ ID NO: 147 - protein, 126 aa, Artificial Sequence
  Description of Artificial Sequence: Synthetic heavy chain variable region amino acid sequence
QVQLVQSGPALVKTTQTLTLTCTFSGFSLTTSGMCVSWIRQPPGKALEWLARIDWDDDKYYSTSLKTRLTISKDTSKNQVVLTLTNVDPVDTATYYCARMQKYDSSGYYLHYFDSWGQGTLVTVSS

SEQ ID NO: 148 - protein, 108 aa, Artificial Sequence
  Description of Artificial Sequence: Synthetic light chain variable region amino acid sequence
DIRLTQSPSSLSASVGDRVTIACRASQSISSYLNWYQQKPGKSPKVLIYAASILQTGVPSRFSGSGSGTDFTLTISSLQPEDFATYYCQQSYSINQYTFGQGTKVEIK

SEQ ID NO: 149 - protein, 125 aa, Artificial Sequence
  Description of Artificial Sequence: Synthetic heavy chain variable region amino acid sequence
QVQLVQSGGEVKKPGASVKVSCKASGYTFTYYGISWVRQAPGQGLEWMGWISAYNGNTNYEQKFQGRVTMTTDTSTGTAYMELRSLTSDDTAVYYCARDRIVVVTAANYYGLDVWGQGTTVTVSS

SEQ ID NO: 150 - protein, 113 aa, Artificial Sequence
  Description of Artificial Sequence: Synthetic light chain variable region amino acid sequence
DIQLTQSPDSLAVSLGERATINCKSSQSVLYRPNNKNFLAWYQQKPGQPPKLLIYWASTRQSGVPDRFSGSGSGTDFTLTISSLQAEDVAVYYCQQYHTTPLTFGGGTKVDIK

SEQ ID NO: 151 - protein, 125 aa, Artificial Sequence
  Description of Artificial Sequence: Synthetic heavy chain variable region amino acid sequence
QVQLQQWGAGLLKPSETLSLTCAIYSGSFSGYYWSWIRQPPGKGLEWIGQINYSGSAYYTPSLKSRVTISVDTSKNQFSLKLSSVTAADTAVYYCARVRITMVQGAIVPCAIDVWGQGTTVTVSS

SEQ ID NO: 152 - protein, 110 aa, Artificial Sequence
  Description of Artificial Sequence: Synthetic light chain variable region amino acid sequence
SYELTQPPSASGTPGQRVTISCSGSSSNIESNFVYWYQQLPGTAPKLLIHRNDQRPSGVPDRFSGSKSGTSASLAISGLRSEDEADYSCAAWDDSLSGVVFGGGTKVTVL

SEQ ID NO: 153 - protein, 124 aa, Artificial Sequence
  Description of Artificial Sequence: Synthetic heavy chain variable region amino acid sequence
QVQLVQSGAEVKKPGASVKLSCKASGYTFTRFYIHWVRQAPGQGLEWMGIINPSGGGTSYAQNFQDRVTMTRDTSTSTVYMELSSLRSEDTAVYYCARNGYSTRSLQNNWFDPWGQGTLVTVSS

SEQ ID NO: 154 - protein, 108 aa, Artificial Sequence
  Description of Artificial Sequence: Synthetic light chain variable region amino acid sequence
ETTLTQSPSSLSASVGDRVTITCRASQSIDNYLNWYQQKPGKAPKLLIYEASSLQSGVPSRFSGSGSGTDFTLTISSLQPEDFATYYCQQTYSSLPYTFGQGTKVEIK

SEQ ID NO: 155 - protein, 124 aa, Artificial Sequence
  Description of Artificial Sequence: Synthetic heavy chain variable region amino acid sequence
QVQLVQSGAEVKKPGASVKVSCKASGYTFTRYGISWVRQAPGQGLEWMGWISDYNGNTKNAEKFQGRVTMTTDTYTNIAYMELRSLRSDDTAVYYCARDWWITVGGIIAPFDYWGQGTLVTVSS

SEQ ID NO: 156 - protein, 107 aa, Artificial Sequence
  Description of Artificial Sequence: Synthetic light chain variable region amino acid sequence
ETTLTQSPGTLSLSPGERATLSCRASQSVSSDYLAWFQQKPGQAPRLLIYGASSRATDIPDRFSGSGSGTDFTLTISRLESEDFAVYYCLHYAGARTFGQGTKVEIK

SEQ ID NO: 157 - protein, 123 aa, Artificial Sequence
  Description of Artificial Sequence: Synthetic heavy chain variable region amino acid sequence
EVQLVESGGVVVQPGGSLRLSCAASGFNFDDYSMHWVRQAPGKGLEWVSVISWDGGITYYADSVKGRFTMSRDNGKKSLYLQMNSLRTEDTAVYYCGKDGDIYSSSSAGIDYWGQGTLVTVSS

SEQ ID NO: 158 - protein, 110 aa, Artificial Sequence
  Description of Artificial Sequence: Synthetic light chain variable region amino acid sequence
SYVLTQPPSASGTPGQRVIISCSGSSSNIGSHTVKWYQQLPGTAPKLLIDRNNQRPSGVPDRFSGPKSGTSASLAISGLQSEDEADYYCASWDDSLNGPVFGGGTQLTVL

SEQ ID NO: 159 - protein, 122 aa, Artificial Sequence
  Description of Artificial Sequence: Synthetic heavy chain variable region amino acid sequence
QVQLVQSGAEVKKPGSSMKVSCKASGGSFSSYGISWLRQAPGQAPEWMGGIIPIFGTINYAQKFQGRITISADESTSTVYMELSSLRIEDTAVYYCARDGRTSPRYYGWDVWGQGTTVTVSS

SEQ ID NO: 160 - protein, 108 aa, Artificial Sequence
  Description of Artificial Sequence: Synthetic light chain variable region amino acid sequence
DIRLTQSPATLSLSPGDRATLSCRASQSLYTYLSWYQQKPGQAPRLLIYDASNRATGIPARFSGSGSGTDFTLTISSLEPEDFAVYYCHYRSNWPPCTFGGGTKVDIK

SEQ ID NO: 161 - protein, 125 aa, Artificial Sequence
  Description of Artificial Sequence: Synthetic heavy chain variable region amino acid sequence
EVQLVESGPGLVKPSETLSLTCTVSGGSISNYYWTWIRQPPGEGLEWIGYIYYTGSTNYNPSLKNRVTISVDTPKNQFSLKLNSVTAADTAVYYCARGWGYSYGYESYYNGLDVWGQGTTVTVSS

SEQ ID NO: 162 - protein, 107 aa, Artificial Sequence
  Description of Artificial Sequence: Synthetic light chain variable region amino acid sequence
DIQLTQSPSFLSASVGDRVTITCRASQGISSYLAWYQLKPGKAPKLLIYAAATLETGVPSRFSGSGSGTEFTLTISGLQPEDFATYYCQQLNSFPFTFGPGTKVEIK

SEQ ID NO: 163 - protein, 123 aa, Artificial Sequence
  Description of Artificial Sequence: Synthetic heavy chain variable region amino acid sequence
QVQLVQSGAEVKKPGESLKISCKGSGDTFSRNWIGWVRQMPGKGLEWMGIIWPGDSDTRYRQFFQGQQGQVIISVDKSISTAYLQWSSLKASDTATYYCATSPYGLGSYYEHWGQGTLVTVSS

SEQ ID NO: 164 - protein, 111 aa, Artificial Sequence
  Description of Artificial Sequence: Synthetic light chain variable region amino acid sequence
NFMLTQPHSLSDSPGKTVVISCTRSSGSIASNYVQWYQQRPGSAPTTVIYEDNQRPSGVPDRFSGSIDSSSNSASLTISGLKTEDEADYYCQSYDSSNPYVFGTGTKVTVL

SEQ ID NO: 165 - protein, 119 aa, Artificial Sequence
  Description of Artificial Sequence: Synthetic heavy chain variable region amino acid sequence
EVQLVESGGGLVKPGGSLRLSCAASGFSFSSYSMHWVRQAPGKGLEWVSSISGSSTYIYHADSVKGRFTISRDNAERSLHLQMNSLRAEDTAVYYCARDPYSSGWLDSWGQGTLVTVSS

SEQ ID NO: 166 - protein, 108 aa, Artificial Sequence
  Description of Artificial Sequence: Synthetic light chain variable region amino acid sequence
ETTLTQSPATLSVSPGERATLSCRASQSVSGNLAWYQQKPGQAPRLLIYGTSTRATGIPARFSGSGSGTEFTLSISSLQSEDFAVYYCQQYNKWPRYTFGQGTKLEIK

SEQ ID NO: 167 - protein, 121 aa, Artificial Sequence
  Description of Artificial Sequence: Synthetic heavy chain variable region amino acid sequence
QVQLVQSGAEVKKPGSSVKVSCKASGGTFTNYNINWVRQAPGQGLQWMGRISPTFAIANYAQKFQGRVTITADKSTSTAYMELSSLRSEDTAVYYCARAPHSGYDLALDYWGQGTLVTVSS

SEQ ID NO: 168 - protein, 107 aa, Artificial Sequence
  Description of Artificial Sequence: Synthetic light chain variable region amino acid sequence
DIQMTQSPSTLSASVGDRVTITCRASQSISSWLAWYQQKPGKAPKLLIYEASSLQSGVPSRFSGSGSGTEFTLTITSLQPDDFATYYCQQYNVYPWTFGQGTKVDIK

SEQ ID NO: 169 - protein, 126 aa, Artificial Sequence
  Description of Artificial Sequence: Synthetic heavy chain variable region amino acid sequence
EVQLVESGGGVVQPGGSLRLSCAASGFSFSDYGMHWVRQAPGKGLEWVSFIRYDASYKFYADSVKGRFTISRDNAKNTLYLQINSLRAEDTAVYYCAKEIYGSGSYYYYYYAIDVWGQGTTVTVSS

SEQ ID NO: 170 - protein, 108 aa, Artificial Sequence
  Description of Artificial Sequence: Synthetic light chain variable region amino acid sequence
EIVLTQSPGTLSLSPGERATLSCRASQSVSSSHLAWYQQKPGQAPRLLIYGASSRATGIPDRFSGSGSGTDFTLTISRLEPEDFAVYYCQQYFRSAWAFGQGTKVDIK

SEQ ID NO: 171 - protein, 123 aa, Artificial Sequence
  Description of Artificial Sequence: Synthetic heavy chain variable region amino acid sequence
EVQLVESGGVVVQPGGSLRLSCAASGFNFDDYAMHWVRQAPGKGLEWVSLISWDGGNTYYSDSVKGRFTISRDNGKNSLYLQMNSLRAEDTALYYCAKDIDRYSGYDYVFHYWGQGTLVTVSS

SEQ ID NO: 172 - protein, 106 aa, Artificial Sequence
  Description of Artificial Sequence: Synthetic light chain variable region amino acid sequence
DIRLTQSPSTLSAYVGDRVTITCRASQSISSWLAWYQQKPGKAPKLLIYKASSLESGVPSRFTGSGSGTEFTLTISGLQPDDFATYYCQQYNSYSTFGGGTKVDIK

SEQ ID NO: 173 - protein, 124 aa, Artificial Sequence
  Description of Artificial Sequence: Synthetic heavy chain variable region amino acid sequence
QVQLVQSGAEVKKPGESLKISCKGSGYNSSINWIGYWIGWVRQMPGKGLEWMGIINPGDSDTRYSPSFQGQVTISVDKSISTAYLQWGSLKASDTAMYYCARRAYRSGWHFDLWGRGTLVTVSS

SEQ ID NO: 174 - protein, 108 aa, Artificial Sequence
  Description of Artificial Sequence: Synthetic light chain variable region amino acid sequence
EIVMTQSPATLSVSPGERATLTCRASQSVSSNLAWYQQKPGQAPRLLIYGASTRATGIPARFSGSGSGTQFTLTISSLQSEDFAVYYCQHYNNWPPYTFGQGTKVEIK

SEQ ID NO: 175 - protein, 119 aa, Artificial Sequence
  Description of Artificial Sequence: Synthetic heavy chain variable region amino acid sequence
QVQLVQSGAEVKKPGSSVKVSCKASGGTFSSYTINWVRQAPGQGLEWMGRIIPILGIANYAQKFQGRVTITADKSTSTAYMELSSLRSEDTAVYYCARRHQDTYGMDVWGQGTTVTVSS

SEQ ID NO: 176 - protein, 111 aa, Artificial Sequence
  Description of Artificial Sequence: Synthetic light chain variable region amino acid sequence
QSVLTQPPSVSGAPGQRVTISCTGSSSNIGAGYDVHWYQQLPGTAPKLLIYGNSNRPSGVPDRFSGSKSGTSASLAITGLQAEDEADYYCQSYDSSLSGSVFGGGTKVTVL

SEQ ID NO: 177 - protein, 123 aa, Artificial Sequence
  Description of Artificial Sequence: Synthetic heavy chain variable region amino acid sequence
EVQLVESGGVVIQPGGSLRLSCAASGFNFDDYSMHWVRQAPGKGLEWVSLISWDGGITYYADSVKGRFTISRDNGKKSLYLQMNSLRTEDTALYYCAKDIDIYSDYAGYFDYWGQGTLVTVSS

SEQ ID NO: 178 - protein, 107 aa, Artificial Sequence
  Description of Artificial Sequence: Synthetic light chain variable region amino acid sequence
DIRMTQSPSSLSASVGDRVTITCRASQGIRNDLGWYQQKPGKAPKRLIYAASSLQSGVPSRFSGSGSGTEFTLTISSLQPEDFATYYCLQHNSYPFTFGQGTRLEIK

SEQ ID NO: 179 - protein, 118 aa, Artificial Sequence
  Description of Artificial Sequence: Synthetic heavy chain variable region amino acid sequence
QVQLVQSGAEVKKPGESLKISCKGPDSSFSVYWIAWVRQMPGKGLEWMGVIYVGDSDTRYSPSFRGQVTISADKSMNTAYLQWSSLKASDTAMYFCARHIPPGPFDLWGQGTMVTVSS

SEQ ID NO: 180 - protein, 110 aa, Artificial Sequence
  Description of Artificial Sequence: Synthetic light chain variable region amino acid sequence
NFMLTQPHSVSASPGKTITISCTRSSGSIASNSVQWYQQRPGSAPTNVIYEDDQRPLGVPNRFSGSIDSSSNSASLTISGLKTEDEADYYCHSYHNSDQVFGGGTKLTVL

SEQ ID NO: 181 - protein, 123 aa, Artificial Sequence
  Description of Artificial Sequence: Synthetic heavy chain variable region amino acid sequence
QVQLQESGPGLVKPSETLSLTCTVSGGSVRSGSYYWSWIRQPPGKALEWIGYIYYSGSTNYNPALESRVTISVDTSKNQFSLMLSSVTAADTAVYYCARSAEGLARLYYFDHWGQGTLVTVSS

SEQ ID NO: 182 - protein, 111 aa, Artificial Sequence
  Description of Artificial Sequence: Synthetic light chain variable region amino acid sequence
QSVLIQPASVSGSPGQSITISCTGTSSDVGGYNYVSWYQQHPGKAPKLMIHDVSNRPSGVSNRFSGSKSGNTASLTISGLQAEDEADYYCSTYRSSNTLVVFGGGTKLTVL

SEQ ID NO: 183 - protein, 119 aa, Artificial Sequence
  Description of Artificial Sequence: Synthetic heavy chain variable region amino acid sequence
EVQLVESGGGVVQPGRSLRLSCAASGFTFSSFPMHWVRQAPGKGLEWVAVASYDGRNNYYAGSVKGRFTISRDNSKNTLYLQINSLRAEDTAVYYCAREVVIAAHFDYWGQGTLVTVSS

SEQ ID NO: 184 - protein, 108 aa, Artificial Sequence
  Description of Artificial Sequence: Synthetic light chain variable region amino acid sequence
SSELTQEPAVSVALGQTVRITCQGDSLRSFYANWYQQKPGQAPILVIYGKNDRPSGIPDRFSGSNSGNTASLTITGAQAEDEADYYCNSRDSSGNHRVFGGGTKVTVL

SEQ ID NO: 185 - protein, 119 aa, Artificial Sequence
  Description of Artificial Sequence: Synthetic heavy chain variable region amino acid sequence
QVQLVQSGAEVKKPGSSVKVSCKASGGTFNSYTINWVRQAPGQGLEWMGRIITIPGATNYAQKFQGRVTFTADKSTSTAYMELSSLRSEDTAVYFCAKRGTGYYGMDVWGQGTTVTVSS

SEQ ID NO: 186 - protein, 110 aa, Artificial Sequence
  Description of Artificial Sequence: Synthetic light chain variable region amino acid sequence
QSVLIQPRSVSGSPGQSVTISCTGTSSDVGGYNYVSWYQQHPGKAPKLMIYDVSERPSGVPDRFSGSKSGNTASLTISGLQAEDEADYYCCSFVGIYILVFGGGTKLTVL

SEQ ID NO: 187 - protein, 122 aa, Artificial Sequence
  Description of Artificial Sequence: Synthetic heavy chain variable region amino acid sequence
EVQLLESGGGLVKPGGSLRLSCAASGFTFSDHYMSWIRQAPGKGLEWVSYISSTSSFTNYADSLKGRFTISRDNAKNSLYLQMNSLRAEDTAVYYCARPYIVALGTRAFDIWGQGTTVTVSS

SEQ ID NO: 188 - protein, 108 aa, Artificial Sequence
  Description of Artificial Sequence: Synthetic light chain variable region amino acid sequence
SYVLTQPPSVSVAPGKTARITCGGNNIGSKTVHWYQQKPGQAPVLVSYYDSDRPSGIPERFSGSNSGNTATLTISRVEAGDEADYYCQVWDGSSEHYVFGTGTKVTVL

SEQ ID NO: 189 - protein, 120 aa, Artificial Sequence
  Description of Artificial Sequence: Synthetic heavy chain variable region amino acid sequence
QVQLVQSGTEVKKPGSSVKVSCKASGGTFSSYTISWVRQAPGQGLEWMGGITPMVGTPNYAQKFQGRVAITADKSTNTAYMELTSLISGDTAVYYCARLVYGSGSHFDYWGQGTLVTVSS

SEQ ID NO: 190 - protein, 108 aa, Artificial Sequence
  Description of Artificial Sequence: Synthetic light chain variable region amino acid sequence
SSELSQDPAVSVALGQTVRITCQGDSLRSFYASWYQQQPGQAPVLVLYGQDNRPSGIPDRFSGSSSGNTASLTITGAQAEDEADYYCNSRNSSGHHWVFGGGTKVTVL

SEQ ID NO: 191 - protein, 131 aa, Artificial Sequence
  Description of Artificial Sequence: Synthetic heavy chain variable region amino acid sequence
EVQLLESGGGLVKPGGSLRLSCAASGFTFSNAWMSWVRQAPGKGLEWVGRIKSKTDGGTTDYAAPVKGRFTISRDDSKNTLYLQMNSLKTEDTAVYYCTTDRFCSSTSCEYYYYYYGMDVWGQGTTVTVSS

SEQ ID NO: 192 - protein, 107 aa, Artificial Sequence
  Description of Artificial Sequence: Synthetic light chain variable region amino acid sequence
ETTLTQSPSSLSASVGDRVTITCRASQSISSYLNWYQQKPGKAPKLLIYAASSLQSGVPSRFSGSGSGTDFTLTISSLQPEDFATYYCQQSYSTPYTFGQGTKVEIK

SEQ ID NO: 193 - protein, 119 aa, Artificial Sequence
  Description of Artificial Sequence: Synthetic heavy chain variable region amino acid sequence
QVQLLESGGGVVQPGRSLRLSCAASGFTFSSFPMHWVRQAPGKGLEWVAVASYDGRNNYYAGSVKGRFTISRDNSKNTLYLQINSLRAEDTAVYYCAREVVIAAHFDYWGQGTLVTVSS

SEQ ID NO: 194 - protein, 108 aa, Artificial Sequence; identical to SEQ ID NO: 184
  Description of Artificial Sequence: Synthetic light chain variable region amino acid sequence

SEQ ID NO: 195 - protein, 116 aa, Artificial Sequence
  Description of Artificial Sequence: Synthetic heavy chain variable region amino acid sequence
QVQLVQSGAEVKKPGASVRVSCKASGYTFNSYSISWVRQAPGQGLEWMGWISVHNGNTNYTQKFQGRVTMTTDTSTSTTYMELRSLRSDDTAVYYCIFGELLYDVWGQGTTVTVSS

SEQ ID NO: 196 - protein, 107 aa, Artificial Sequence
  Description of Artificial Sequence: Synthetic light chain variable region amino acid sequence
DIQLTQSPSSLSASVGDRVTITCRASQGISNYLAWYQQKPGKVPNLLIYAASTLQSGVPSRFSGSGSGTDFTLTISSLQPEDVATYYCQKYNSAPLTFGPGTKVEIK

SEQ ID NO: 197 - protein, 122 aa, Artificial Sequence
  Description of Artificial Sequence: Synthetic heavy chain variable region amino acid sequence
EVQLVESGGGVVQPGRSLRLSCAASGFTFSSYGMHWVRQAPGKGLEWVAVIWYDGSNKYYADSVKGRFTISRDNSKNTLYLQMNSLRAEDTAVYYCARDIAAAGTMRAFDIWGQGTTVTVSS

SEQ ID NO: 198 - protein, 111 aa, Artificial Sequence
  Description of Artificial Sequence: Synthetic light chain variable region amino acid sequence
QSVLIQPASVSGSPGQSITISCTGTSSDVGGYNYVSWYQQHPGKAPKLMIYDVSNRPSGVSNRFSGSKSGNTASLTISGLQAEDEADYYCSSYTSSSTLVVFGGGTKLTVL

SEQ ID NO: 199 - protein, 119 aa, Artificial Sequence
  Description of Artificial Sequence: Synthetic heavy chain variable region amino acid sequence
QVQLVESGGGFVKPGGSLRLSCAASGFTFSDYYMSWIRQAPGKGLEWLSYISSTSLFTYYADSVKGRFTISRDNAKNSLYLQMNSLRADDTAVYYCARAYGKGTMVGYWGQGTMVTVSS

SEQ ID NO: 200 - protein, 108 aa, Artificial Sequence
  Description of Artificial Sequence: Synthetic light chain variable region amino acid sequence
EIVMTQSPGTLSLAPGERATLSCRASQSVSIDYLAWYQHKPGQAPRLLIYTASNRATGIPDRFSGSGSGTDFTLTISRLEPEDVAMYYCQQYGNSPYTFGQGTKVEIK

SEQ ID NO: 201 - protein, 125 aa, Artificial Sequence
  Description of Artificial Sequence: Synthetic heavy chain variable region amino acid sequence
QVQLVQSGAEVKKPGSSVKVSCKASGGTFSTYTITWVRQAPGQGLEWMGRIVPIFGVVNNAQKFLGRLTITADKSTSTAYMELSSLRSEDTAVYYCARIPCSGNCQDYYYGMDVWGQGTTVTVSS

SEQ ID NO: 202 - protein, 107 aa, Artificial Sequence
  Description of Artificial Sequence: Synthetic light chain variable region amino acid sequence
DIQLTQSPSFLSASVGDRVTITCRASQGISSYLVWYQQKPGKAPKLLIYAASTLQSGVPSRFSGSGSGTEFTLTISSLQPEDFATYYCQQLNNYPPTFGPGTKVDIK

SEQ ID NO: 203 - protein, 125 aa, Artificial Sequence
  Description of Artificial Sequence: Synthetic heavy chain variable region amino acid sequence
QVQLVQSGGGLVKPGGSLRLSCAASGFTFSNAWISWVRQAPGKGLEWVGRIKSATDGGTTDYAAPVKGRFTISRDDSKNTLYLQMDSLKTEDTAVYYCTTSYPYFDWLPFSVDYWGQGTLVTVSS

SEQ ID NO: 204 - protein, 110 aa, Artificial Sequence
  Description of Artificial Sequence: Synthetic light chain variable region amino acid sequence
SYELMQPPSASGTPGQRVTISCSGSNSNIGSNTVSWYQQLPGTAPKLLIYNNNQRPSGVPDRFSGSKSGTSASLAISGLQSEDEADYYCATWDDSLNGWVFGGGTKLTVL

SEQ ID NO: 205 - protein, 120 aa, Artificial Sequence
  Description of Artificial Sequence: Synthetic heavy chain variable region amino acid sequence
QVQLVQSGAEVKKPGASVKVSCKASGYTFTTYGISWVRQAPGQGLEWMGWISTYKTYTNYAQKFQGRVTMTTDTSTSTAYMELRSLRSDDTAVYYCAKVAGGSGSYGDYWGQGTLVTVSS

SEQ ID NO: 206 - protein, 108 aa, Artificial Sequence
  Description of Artificial Sequence: Synthetic light chain variable region amino acid sequence
QPVLTQPPSVSVAPGKTARITCGGNNIGSKSVHWYLQKPGQAPVLVIYYDSDRPSGIPERFSGSNSGNTATLTISRVEAGDEADFFCQVWDSSSDHWVFGGGTKVTVL

SEQ ID NO: 207 - protein, 119 aa, Artificial Sequence
  Description of Artificial Sequence: Synthetic heavy chain variable region amino acid sequence
QVQLVQSGAEVKKPGSSVKVSCKASGGTFSSYTISWVRQAPGQGLEWMGRIIPILGIANYAQKFQGRVTITADKSTSTAYMELSSLRSEDTAVYYCARPSSSSFAFDYWGQGTLVTVSS

SEQ ID NO: 208 - protein, 111 aa, Artificial Sequence
  Description of Artificial Sequence: Synthetic light chain variable region amino acid sequence
QSVLTQPASVSGSPGQSITISCTGTSSDVGGYNYVSWYQQHPGKAPKLMIYDVSNRPSGVSNRFSGSKSGNTASLTISGLQAEDEADYYCSSYTSSSTPVVFGGGTKVTVL

SEQ ID NO: 209 - protein, 121 aa, Artificial Sequence
  Description of Artificial Sequence: Synthetic heavy chain variable region amino acid sequence
QVQLVQSGAEVKKPGASVKVSCKASGYTFTSYGISWVRQAPGQGLEWMGWISAYNGNTNYAQKLQGRVTMTTDTSTSTAYMELRSLRSDDTAVYYCARDPPVIAAGDFQHWGQGTLVTVSS

SEQ ID NO: 210 - protein, 112 aa, Artificial Sequence
  Description of Artificial Sequence: Synthetic light chain variable region amino acid sequence
DIVLTQSPLSLPVTLGQPASISCRSSQSLVHSDGNTYLNWFQQRPGQSPRRLIYKVSNRDSGVPDRFSGSGSGTDFTLKISRVEAEDVGVYYCMQGTHWPPDFGQGTRLEIK

SEQ ID NO: 211 - protein, 121 aa, Artificial Sequence
  Description of Artificial Sequence: Synthetic heavy chain variable region amino acid sequence
QVQLVQSGAEVKKPGASVKVSCKASGYTFTNYGITWVRQAPGQGLEWMGWISAYNGVRNYAQKLQGRVTMTIDTSRTTAYMELKNLRSDDTAMYYCARGPPVIAADDFQHWGQGTMVTVSS

SEQ ID NO: 212 - protein, 112 aa, Artificial Sequence
  Description of Artificial Sequence: Synthetic light chain variable region amino acid sequence
DIQMTQSPLSLPVTLGQPASISCRSSQSLVHSNGDTYLNWFQQRPGRSPRRLIYKVSNRDSGVPDRFSGSGSGTDFTLKISRVEAEDVGVYYCMQGTHWPPDFGQGTRLEIK

SEQ ID NO: 213 - protein, 125 aa, Artificial Sequence
  Description of Artificial Sequence: Synthetic heavy chain variable region amino acid sequence
QVQLVQSGAEVKKPGSSVKVSCKASGGTFNNYAINWVRQAPGQGLEWMGGIIPMFGTANYAQKFQGRVTMTADESTSTAYMELSSLRSEDTAVYYCASSQIFVGGNYYKLEFDNWGQGTLVTVSS

SEQ ID NO: 214 - protein, 110 aa, Artificial Sequence
  Description of Artificial Sequence: Synthetic light chain variable region amino acid sequence
QSVLTQPPSVSAAPGQKVTISCSGSNSNIGYNDVSWYQQLPGTAPQLLIYDNNKRTSGIPDRFSGSKFGTSATLGITGLQTGDEADYYCGTWDSSLSTVIFGGGTKLTVL

SEQ ID NO: 215 - protein, 122 aa, Artificial Sequence
  Description of Artificial Sequence: Synthetic heavy chain variable region amino acid sequence
QVQLVQSGAEVKKPGESLKISCKVSGYSFTSYWIGWVRQMPGKGLEWMGIIYPGDSDTRYSPSFQGQVTISADKSITTAYLQWSSLKASDTAMYYCARPAHSSSWYGAFDLWGQGTTVTVSS

SEQ ID NO: 216 - protein, 107 aa, Artificial Sequence
  Description of Artificial Sequence: Synthetic light chain variable region amino acid sequence
DIQMTQSPSSLSASVGDRVTITCRASQGISNYLAWYQQKPGKVPKLLIYAASTLQSGVPSRFSGSGSGTDFTLTISSLQPEDVATYYCQKYNSAPLTFGGGTKVEIK

SEQ ID NO: 217 - protein, 121 aa, Artificial Sequence
  Description of Artificial Sequence: Synthetic heavy chain variable region amino acid sequence
QVQLVQSGAEVKKPGSSVKVSCKASGGTFSSYTINWVRQAPGQGLEWMGRIIPVLGMASYVQNFQGRVSITADESTSTAYMELSSLTSEDTALYYCAKGAVAAANDVFDVWGQGTTVTVSS

SEQ ID NO: 218 - protein, 113 aa, Artificial Sequence
  Description of Artificial Sequence: Synthetic light chain variable region amino acid sequence
DIQMTQSPDSLAVSLGERATINCKSSQSVFYSSNNKHYLAWYQQKPGQPPKLLFYWASTRESGVPDRFSGSGSGTDFTLTISSLQAEDVAVYYCQQYYRIPYTFGQGTKVEIK

SEQ ID NO: 219 - protein, 120 aa, Artificial Sequence
  Description of Artificial Sequence: Synthetic heavy chain variable region amino acid sequence
QVQLVQSGAEVKKPGSSVKVSCKASGGTFSSHAFSWVRQAPGQGLEWMGGIIPSLNTANYAQKFQGRVSITADESTGTAYMELSSLRSDDTAVYFCAREVFGYGYYFDYWGQGTLVTVSS

SEQ ID NO: 220 - protein, 108 aa, Artificial Sequence
  Description of Artificial Sequence: Synthetic light chain variable region amino acid sequence
ETTLTQSPATLSVSPGERATLSCRASQNVNSNLAWYQQKPGQAPRLLIYGASTRATGIPARFSGSGSGTDFTLTISSLQSEDFAVYYCQQYNMWPPFTFGQGTKLEIK

SEQ ID NO: 221 - protein, 118 aa, Artificial Sequence
  Description of Artificial Sequence: Synthetic heavy chain variable region amino acid sequence
QVQLVQSGAEVKKPGESLKISCKGPDSSFSVYWIAWVRQMPGKGLEWMGVIYVGDSDTRYSPSFRGQVTISADKSINTAYLQWSSLKASDTAMYFCARHIPPGPFDLWGQGTTVTVSS

SEQ ID NO: 222 - protein, 110 aa, Artificial Sequence
  Description of Artificial Sequence: Synthetic light chain variable region amino acid sequence
NFMLTQPHSVSASPGKTITISCTRSSGSIASNSVQWYQQRPGSAPTNVIYEDNQRPLGVPNRFSGSIDSSSNSASLTISGLKTEDEADYYCQSYHSSDQVFGGGTKVTVL

SEQ ID NO: 223 - protein, 121 aa, Artificial Sequence
  Description of Artificial Sequence: Synthetic heavy chain variable region amino acid sequence
QVQLVQSGAEVKEPGASVKVSCKASGYTFTNYGISWVRQAPGQGLEWLGWISAYNGNIHYAQKVQGRVTMTTDTSTSTGFMELRSLRSDDTAVYYCAREPPVIAAGDFQHWGQGTLVTVSS

SEQ ID NO: 224 - protein, 112 aa, Artificial Sequence
  Description of Artificial Sequence: Synthetic light chain variable region amino acid sequence
ETTLTQSPLSLPVTLGQPASISCRSSQSLVHSNGNTYLSWFQQRPGQSPRRLIYRVSNRDSGVPDRFSGSGSGTDFTLKISRVEAEDVGLYYCMQGTHWPPDFGQGTRLEIK

SEQ ID NO: 225 - protein, 131 aa, Artificial Sequence
  Description of Artificial Sequence: Synthetic heavy chain variable region amino acid sequence
QVQLVQSGAEVKKPGASVKVSCKASGFTFTNYGTSYGITWVRQAPGQGLEWMGWINTSNGNPNYAQKLQGRVTMTADTSTSTAYMELRSLISDDTAVYYCARGHRMVRGVVPTGYYGLDVWGQGTTVTVSS

SEQ ID NO: 226 - protein, 107 aa, Artificial Sequence
  Description of Artificial Sequence: Synthetic light chain variable region amino acid sequence
DIQLTQSPSSLSASVGDRVTITCRASQSISSYLNWYQQKPGKAPKLLIFAASNLQSGVPSRFSGSGSGTDFTLTISSLQPEDFATYYCQQSYITPWTFGQGTKVEIK

SEQ ID NO: 227 - protein, 121 aa, Artificial Sequence
  Description of Artificial Sequence: Synthetic heavy chain variable region amino acid sequence
QVQLVQSGAEVKKPGASVKVSCKASGYTFANYGIGWVRQAPGQGLEWMGWISAYNGKTNYAQKFQGRVTMTTDTSTSTAYMELRSLRSDDTAVYYCAREPPVIAAGDFPHWGQGTLVTVSS

SEQ ID NO: 228 - protein, 112 aa, Artificial Sequence
  Description of Artificial Sequence: Synthetic light chain variable region amino acid sequence
ETTLTQSPLSLPVTLGQPASISCRSSQSLEHSDLNTYLSWFQQRPGQSPRRLIYKVSNRDSGVPDRFSGSGSGTDFTLRISRVEAEDVGVYYCMQGTHWPPDFGQGTRLEIK

SEQ ID NO: 229 - protein, 125 aa, Artificial Sequence
  Description of Artificial Sequence: Synthetic heavy chain variable region amino acid sequence
QVQLVQSGGGLVKPGGSLRLSCAASGFTFSDYYMSWIRQAPGKGLEWVSYISSSSSYTNYADSVKGRFTISRDNAKNSLYLQMNSLRAEDTAVYYCAKRTEYCSSTGCAYYFDYWGQGTLVTVSS

SEQ ID NO: 230 - protein, 111 aa, Artificial Sequence
  Description of Artificial Sequence: Synthetic light chain variable region amino acid sequence
QSVVTQPPSVSGAPGQRVTISCTGSSSNIGAGYDVHWYQQLPGTAPKLLIYGNSNRPSGVPDRFSGSKSGTSASLAITGLQAEDEADYYCQSYDSSLSGSVFGGGTKVTVL

SEQ ID NO: 231 - protein, 119 aa, Artificial Sequence
  Description of Artificial Sequence: Synthetic heavy chain variable region amino acid sequence
EVQLLESGGGLVKPGGSLRLSCAASGFTLTSYSMNWVRQAPGKGLEWVSSISSSSSYIHYADSVKGRFTISRDNAKNSLYLQMNSLRAEDTAVYYCAGSSLYPPFFDYWGQGTLVTVSS

SEQ ID NO: 232 - protein, 111 aa, Artificial Sequence
  Description of Artificial Sequence: Synthetic light chain variable region amino acid sequence
QSVVTQPPSVSGAPGQRVTISCTGSSSNLGAGYDVHWYQQLPGTAPKLLIYGNNNRPSGVPDRFSGSKSGTSASLAITGLQAEDEADYYCQSYDSSLSSVVFGGGTKLTVL

SEQ ID NO: 233 - protein, 118 aa, Artificial Sequence
  Description of Artificial Sequence: Synthetic heavy chain variable region amino acid sequence
QVQLVQSGAEVKKPGASVKVSCKVSGDTLTELSIHWVRQAPGKGHEWMGYFDHEDGEIMYAQKFQGRVTMTGDTSTDTAYMELSSLRSEDTAVYYCATVAAAGQFDYWGQGTLVTVSS

SEQ ID NO: 234 - protein, 107 aa, Artificial Sequence
  Description of Artificial Sequence: Synthetic light chain variable region amino acid sequence
DIQLTQSPSSLSASVGDRVTITCRARQSISTYLNWYQQKPGKAPKLLIYAASSLQSGVPSRFSGSGSGTDFTLTISSLQPEDFATYYCQQSYSSPYTFGQGTKVDIK

SEQ ID NO: 235 - protein, 126 aa, Artificial Sequence
  Description of Artificial Sequence: Synthetic heavy chain variable region amino acid sequence
QITLKESGPVLVKPSETLTLTCTVSGFSLSNAKMGVSWIRQPPGKALEWLAHIFSNDEKSYNTSLKNRLTISKDTSKSQVVLTMTNMDTVDTATYYCARINYYDSSGYYLANFDYWGQGTLVTVSS

SEQ ID NO: 236 - protein, 113 aa, Artificial Sequence
  Description of Artificial Sequence: Synthetic light chain variable region amino acid sequence
NIRLTQSPSSLSASVGDRVTITCRASQRIASYLNWYQQKPGHAPKLLIHAASSLQSGVPSRFSGSGSGTDFTLTINSLLPEDFATYYCQQSYSSPPHSSPPLTFGGGTKVEIK

SEQ ID NO: 237 - protein, 122 aa, Artificial Sequence
  Description of Artificial Sequence: Synthetic heavy chain variable region amino acid sequence
EVQLVESGAEVKKPGESLKISCKGSGYSFATYWIGWVRQMPGKGLEWMGIIYPGDSDTRYSPSFQGQVTISADKSISTAYLQWSSLKASDTAIYYCARAKLPVAGLYYFDYWGQGTLVTVSS

SEQ ID NO: 238 - protein, 106 aa, Artificial Sequence
  Description of Artificial Sequence: Synthetic light chain variable region amino acid sequence
DIQLTQSPSSLSASVGDRVTITCRASQGISSTLAWYQQKPGKAPKLLIYDASSLESGVPSRFSGSGSGTDFTLTISSLHPEDFATYYCQQFNTYPTFGGGTKVEIK

SEQ ID NO: 239 - protein, 127 aa, Artificial Sequence
  Description of Artificial Sequence: Synthetic heavy chain variable region amino acid sequence
QVQLVQSGAEVKKPGESLRISCTGSGYTFTNYWISWVRQMPGKGLEWMGRIDPTDSYTNYSPSFQGHVTISADKSISTAYLQSSSLKASDTATYYCARHRRLVPAAMSRGYYGMDVWGQGTTVTVSS

SEQ ID NO: 240 - protein, 107 aa, Artificial Sequence
  Description of Artificial Sequence: Synthetic light chain variable region amino acid sequence
EIVMTQSPSSLSASVGDRATITCRASQSISSYLNWYQQKPGKAPKLLIYAASNLQSGAPSRFSGSGSGTDFTLTISSLQPEDFATYFCQQTYSTPYTFGQGTKVEIK

SEQ ID NO: 241 - protein, 118 aa, Artificial Sequence
  Description of Artificial Sequence: Synthetic heavy chain variable region amino acid sequence
QVQLVQSGAEVKKPGESLKISCKGSGYTFTNYWIGWVRQMPGKGLEWMGIIYPDDSDTRYSPSFQGQVTISVDKSINTAYLQWSSLRASDTAIYYCACSNWPHYFDSWGQGTLVTVSS

SEQ ID NO: 242 - protein, 110 aa, Artificial Sequence
  Description of Artificial Sequence: Synthetic light chain variable region amino acid sequence
NFMLTQPHSVSESPGKTVTISCTRSSGNIAGNYVQWYQQRPGSAPTTVIYEDNQRPSGVPDRFSGSIDSSSNSASLTISGLKTEDEAVYYCQSYHPGNWVFGGGTKLTVL

SEQ ID NO: 243 - protein, 120 aa, Artificial Sequence
  Description of Artificial Sequence: Synthetic heavy chain variable region amino acid sequence
QVQLVQSGAEVKKPGESLKISCKGSGYSFSSYWVAWVRQMPGKGLEWMGIIYPADSDTRYSPSFQGQVTISADKSDSTAYLQWGSLKASDTAMYYCARSLYGSGDYFDYWGQGTLVTVSS

SEQ ID NO: 244 - protein, 110 aa, Artificial Sequence
  Description of Artificial Sequence: Synthetic light chain variable region amino acid sequence
NFMLTQPHSVSESPGRTVIISCTRSSGSIATNYVQWYQQRPGSAPTTVIYEDNQRPSGVPDRFSGSIDSSSNSASLTISGLKTEDEADYYCQSYGSGDVVFGGGTKVTVL

SEQ ID NO: 245 - protein, 120 aa, Artificial Sequence
  Description of Artificial Sequence: Synthetic heavy chain variable region amino acid sequence
QVQLVQSGAEVKKPGASVKLSCKASGYTFTTYTINWVRQAPGQGLEWMGWISGYNGNTDYAQKLQGRFTMTTDTSTNTAYMELRSLTSDDTAVYYCAKGGGGSESYFDYWGQGTLVTVSS

SEQ ID NO: 246 - protein, 109 aa, Artificial Sequence
  Description of Artificial Sequence: Synthetic light chain variable region amino acid sequence
SYELTQPPSVSVAPGKTARISCGGNNIGSKSVHWYQQKPGQAPVLVIYYDRDRPSGIPERFSGSNSGNTATLTISRVEAGDEADYYCQLWDRSSDHPYVFGTGTKVTVL

SEQ ID NO: 247 - protein, 120 aa, Artificial Sequence
  Description of Artificial Sequence: Synthetic heavy chain variable region amino acid sequence
EVQLLESGGGLVQPGGSLRLSCAASGFTFSIYSMNWVRQAPGKGLEWISYISRSGSTIFYADSVKGRFTISRDDAKNSLFLQMTSLRDADTAVYYCARVDCSNNKCYDYWGQGTLVTVSS

SEQ ID NO: 248 - protein, 108 aa, Artificial Sequence
  Description of Artificial Sequence: Synthetic light chain variable region amino acid sequence
DIQLTQSPATLSLSPGERATLSCRASQSISSFLAWYQQKPGQAPRLLIYDASKRATGTPARFSGGGSGRDFTLTISSLEPEDFAVYYCQQRSSWPLYTFGQGTKVEIK

SEQ ID NO: 249 - protein, 123 aa, Artificial Sequence
  Description of Artificial Sequence: Synthetic heavy chain variable region amino acid sequence
EVQLVESGGVVVQPGGSLRLSCAVSGFNFDDYSMHWVRQLPGKGLEWVSLISWDGGITYYADSVKGRFTISRDNSKNSLYLQMNSLRTEDTALYYCAKDGNRYSDNDYYFDYWGQGTLVTVSS

SEQ ID NO: 250 - protein, 107 aa, Artificial Sequence
  Description of Artificial Sequence: Synthetic light chain variable region amino acid sequence
DIRLTQSPGTLSLSPGERATLSCRASQGVSSSYLAWYQQKPGQAPRLLIYGASSRATGIPDRFSGSGSGTDFTLTISRLEPEDFAVYYCQQYGSSPLFGPGTKVEIK

SEQ ID NO: 251 - protein, 128 aa, Artificial Sequence
  Description of Artificial Sequence: Synthetic heavy chain variable region amino acid sequence
QVQLVQSGAEVKKPGSSVKVSCKASGGTFSSYAIYWVRQAPGQGLECMGGIIPIFGSANYAQKFQGRVTITADESTSTAYMELSSLRSEDTAVYYCATDSLKTTYYYGSSGYFRDHVWGQGTTVTVSS

SEQ ID NO: 252 - protein, 108 aa, Artificial Sequence
  Description of Artificial Sequence: Synthetic light chain variable region amino acid sequence
ETTLTQSPSSLSASVGDRVTITCRASQGISNYLAWYQQKPGKVPKLLIFAASTLQSGVPSRFSGSGSGTDFTLTISSLQPEDVATYYCQNFNSVLSFTFGPGTKVDIK

SEQ ID NO: 253 - protein, 117 aa, Artificial Sequence
  Description of Artificial Sequence: Synthetic heavy chain variable region amino acid sequence
EVQLVESGGGLVQPGRSLRLSCKTSGFTFGDYAMSWVRQAPGQGLDWVGFIRTKAYGGTTEYAASVKGRFTLSRDDSKSIAYLQMNSLKTEDTAVYYCKSGGQFDYWGRGTLVTVSS

SEQ ID NO: 254 - protein, 111 aa, Artificial Sequence
  Description of Artificial Sequence: Synthetic light chain variable region amino acid sequence
NFMLTQPHSVSGSPGKTVTISCTGSSGSIASNYVQWYQQRPGSAPTTVICEDNQRPSGVPDRFSGSIDSSSNSASLTISGLKTEDEADYYCQSYDRSNQEVFGGGTKLTVL

SEQ ID NO: 255 - protein, 123 aa, Artificial Sequence
  Description of Artificial Sequence: Synthetic heavy chain variable region amino acid sequence
QVQLVQSGGGLVKPGGSLRLSCAASGFSFSDYYMNWIRQAPGKGLEWVSYISSSSSYTNYADSVKGRFTISRDNAKKSLYLQMNSLRAEDTAVYYCASQTYSDYARGGAFDIWGQGTTVTVSS

SEQ ID NO: 256 - protein, 111 aa, Artificial Sequence
  Description of Artificial Sequence: Synthetic light chain variable region amino acid sequence
QSVLTQPPSVSGAPGQRVTISCTGSSSNIGAGYDVHWYQQLPGTAPKLLIYGNNNRPSGVPDRFSGSKSGTSASLAITGLQAEDEADYYCQSYDSSLSGSVFGTGTKVTVL

SEQ ID NO: 257 - protein, 122 aa, Artificial Sequence
  Description of Artificial Sequence: Synthetic heavy chain variable region amino acid sequence
EVQLLESGGGLVQPGGSLRLSCAASGFTFSSYAMNWVRQAPGKGLEWVSTISGSGSSTYYADSVEGRFTISRDNSKNTLYLQMNSLRAEDTAIYYCAKEPRDMYIQQWLDSWGQGTLVTVSS

SEQ ID NO: 258 - protein, 107 aa, Artificial Sequence
  Description of Artificial Sequence: Synthetic light chain variable region amino acid sequence
GIRLTQSPSSVSASVGDRVIITCRASQGIRSWLAWYQQKPGKAPKLLIYAASRLQSGVPSRFSGSGSETDFTLTISSLQPEDFASYYCQQANSFPLTFGGGTKVEIK

SEQ ID NO: 259 - protein, 129 aa, Artificial Sequence
  Description of Artificial Sequence: Synthetic heavy chain variable region amino acid sequence
EVQLVESGGGVVQPGGSLRLSCAASGFSFSSCGMHWVRQVSGKGLEWVAFIRYDGSNKFYADSVKGRFTISRDNSKNTLYLQMNSLRVEDTAVYYCAKGGLEDVSTGYSPHYYYGMDVWGQGTTVTVSS

SEQ ID NO: 260 - protein, 106 aa, Artificial Sequence
  Description of Artificial Sequence: Synthetic light chain variable region amino acid sequence
QPVLTQPPSVSVSPGQTASITCSGDKLAYKYTCWYQQKPGQSPVLVIFQDSKRPSGIPERFSGSNSGNTATLTISGTQALDEADYYCQAWDSSTVVFGGGTKLTVL

SEQ ID NO: 261 - protein, 119 aa, Artificial Sequence
  Description of Artificial Sequence: Synthetic heavy chain variable region amino acid sequence
QVQLVQSGAEVKKPGESLKISCKGSGYTFTNYWIGWVRQMPGKGLEWMGIIYPGDSDTRYSPSFQGQVTISADKSITTAYLQWRVLKASDTAMYYCATMRGSSSHFHHWGQGTLVTVSS

SEQ ID NO: 262 - protein, 107 aa, Artificial Sequence
  Description of Artificial Sequence: Synthetic light chain variable region amino acid sequence
DIQVTQSPSSLSASVGDRVTITCRAGQGIGNYLAWYQQKPGKVPKVLIYAASTLQSGVPSRFSGSGSGTEFTLTISSLQPEDVATYYCQKYNNAPYAFGQGTRLEIK

SEQ ID NO: 263 - protein, 127 aa, Artificial Sequence
  Description of Artificial Sequence: Synthetic heavy chain variable region amino acid sequence
EVQLLESGGGLVQPGGSLRLSCSASGFTFNNYVMHWVRQAPGKGLEDASAISSNGVSTNYADSVKGRFTISRDNSKNTLYLQMRSLRAEDTALYYCVRDLIPHDSSAYYGYHGMDVWGQGTTVTVSS

SEQ ID NO: 264 - protein, 110 aa, Artificial Sequence
  Description of Artificial Sequence: Synthetic light chain variable region amino acid sequence
QPVLTQPPSASGTPGQSVTISCSGSSSNIGTNVVNWYQQLPGTAPKLLIYSNDLRPSGVPDRFSGSKSGTSASLAISGLQSEDEANYYCAAWDDSLNGVLFGGGTKLTVL

SEQ ID NO: 265 - protein, 122 aa, Artificial Sequence
  Description of Artificial Sequence: Synthetic heavy chain variable region amino acid sequence
EVQLLESGPALVKPTQTLTLTCTFSGFSLTTSGMCVSWIRQPPGKALEWLARIDWDDDQYFSTSLRTRLSISKDTSKNQVVLTMTNMDPVDTATYYCARSALNIAARGFDIWGQGTTVTVSS

SEQ ID NO: 266 - protein, 106 aa, Artificial Sequence
  Description of Artificial Sequence: Synthetic light chain variable region amino acid sequence
QPGLTQPPSVSVSPGQTARITCSGDVLPKHFSYWYQQKPGQAPVLVIHRDSERPSGIPERFSGSSSGTTVTLTISGVQAEDEADYYCQFSDITNTVFGGGTKLTVL

SEQ ID NO: 267 - protein, 118 aa, Artificial Sequence
  Description of Artificial Sequence: Synthetic heavy chain variable region amino acid sequence
QVQLVQSGGGLVQPGGSLRLSCAASGFTVSSNYMGWVRQAPGKGLEWVSVIYTGGSTYYADSVKGRFTISRDNFKNTLYLQMNSLRAEDTALYYCARDLYSSGWFGYWGQGTLVTVSS

SEQ ID NO: 268 - protein, 107 aa, Artificial Sequence
  Description of Artificial Sequence: Synthetic light chain variable region amino acid sequence
DIRLTQSPATLSVSPGERATLSCRASQSVSINLGWFQQKPGQSPRLLIYGTSTRATGIPARFSGSGSGTEFTLTISSLQSEDFAVYYCHQYNNWPYTFGQGTKVEIK

SEQ ID NO: 269 - protein, 120 aa, Artificial Sequence
  Description of Artificial Sequence: Synthetic heavy chain variable region amino acid sequence
EVQLLESGGGVVQSGRSLRLSCAASGFTFNNYAMHWVRQAPGKGLEWVAVISFDGGNKFYGDSVQGRFTISRDNSKNTLYLQTNSLRPEDTAVYYCARDRWEIQIGLDIWGQGTTVTVSS

SEQ ID NO: 270 - protein, 107 aa, Artificial Sequence
  Description of Artificial Sequence: Synthetic light chain variable region amino acid sequence
SYVLTQPPSVSVSPGQTARITCSGDALARQNAYWYQQKPGQAPVLVMYRDTGRPSGIPERFSGSSSGTTVTLTISEVQAEDEADYYCQSADSSGAYVFGTGTKVTVL

SEQ ID NO: 271 - protein, 122 aa, Artificial Sequence
  Description of Artificial Sequence: Synthetic heavy chain variable region amino acid sequence
EVQLLESGGGLVKPGGSLRLSCAASGFTFSSYSMNWVRQAPGKGLEWVSSISSSSSYIYYADSVKGRFTISRDNAKNSLYLQMNSLRAEDTAVYYCARVGWGYSYGYWFDPWGQGTLVTVSS

SEQ ID NO: 272 - protein, 111 aa, Artificial Sequence
  Description of Artificial Sequence: Synthetic light chain variable region amino acid sequence
QSVLTQPPSVSGAPGQRVTISCTGSSSNIGAGYDVHWYQQLPGTAPKLLIYGNSNRPSGVPDRFSGSKSGTSASLAITGLQAEDEADYYCQSYDSSLSGVVFGGGTKLTVL

SEQ ID NO: 273 - protein, 122 aa, Artificial Sequence
  Description of Artificial Sequence: Synthetic heavy chain variable region amino acid sequence
EVQLLESGGGVVQPGRSLRLSCAASGFTFSSYGMHWVRQAPGKGLEWVAVISYDGSNKYYADSVKGRFTISRDNSKNTLYLQMNSLRAEDTAVYYCAKDIHHVLRFLDPDYWGQGTLVTVSS

SEQ ID NO: 274 - protein, 110 aa, Artificial Sequence
  Description of Artificial Sequence: Synthetic light chain variable region amino acid sequence
QSVLIQPASVSGFPGQSITISCTGTSSDVGGYNYVSWYQQHPGKAPKLMIYEVSNRPSGVSNRFSGSKSGNTASLTISGLQAEDEADYYCSSYTSSSTLVFGGGTKLTVL

SEQ ID NO: 275 - protein, 121 aa, Artificial Sequence
  Description of Artificial Sequence: Synthetic heavy chain variable region amino acid sequence
EVQLVESGGGVVQPGRSLRLSCAASGFTFSSYGMHWVRQAPGKGLEWVAVISYDGSNKYYADSVKGRFTISRDNSKNTLYLQMNSLRAEDTAVYYCAKEGYNWNDYYFDYWGQGTLVTVSS

SEQ ID NO: 276 - protein, 108 aa, Artificial Sequence
  Description of Artificial Sequence: Synthetic light chain variable region amino acid sequence
QPVLTQPPSVSVAPGKTARITCGGNNIGSKSVHWYQQKPGQAPVLVVYDDSDRPSGIPERFSGSNSGNTATLTISRVEAGDEADYYCQVWDSSSDHWVFGGGTKLTVL

SEQ ID NO: 277 - protein, 120 aa, Artificial Sequence
  Description of Artificial Sequence: Synthetic heavy chain variable region amino acid sequence
EVQLLESGGGLVQPGGSLRLSCAASGFTVSSNYMSWVRQAPGKGLEWVSDIYSGGRTDYADSVKGRFTISRDNSKNTLDLQMNSLRAEDTAVYYCARETLGMDHWYFDLWGRGTLVTVSS

SEQ ID NO: 278 - protein, 108 aa, Artificial Sequence
  Description of Artificial Sequence: Synthetic light chain variable region amino acid sequence
QPGLTQPPSVSVAPGKTARITCGGNNIGSKSVHWYQQKPGQAPVLVVYDDSDRPSGIPERFSGSNSGNTATLTISRVEAGDEADYYCQVWDSTSDHPVFGGGTKLTVL

SEQ ID NO: 279 - protein, 122 aa, Artificial Sequence
  Description of Artificial Sequence: Synthetic heavy chain variable region amino acid sequence
EVQLVESGGGLVKPGGSLRLSCAASGFTFSSYSMNWVRQAPGKGLEWVSSISSSSSYIYYADSVKGRFTISRDNAKNSLYLQMNSLRAEDTAVYYCARLGYCSGGSCHFDYWGQGTLVTVSS

SEQ ID NO: 280 - protein, 112 aa, Artificial Sequence
  Description of Artificial Sequence: Synthetic light chain variable region amino acid sequence
QPVLTQPPSVSGAPGQRVTISCTGSSSNIGAGYDVHWYQQLPGTAPKLLIYGNSNRPSGVPDRFSGSKSGTSASLAITGLQAEDEADYYCQSYDSSLSGFYVFGTGTKLTVL

SEQ ID NO: 281 - protein, 122 aa, Artificial Sequence
  Description of Artificial Sequence: Synthetic heavy chain variable region amino acid sequence
QVQLQESGPGLVKPSETLSLTCTVSGGSISSYYWSWIRQPPGKGLEWIGYIYYSGSTNYNPSLKSRVTISVDTSKNQFSLKLSSVTAADTAVYYCARGNEELGTGSNWFDPWGQGTLVTVSS

SEQ ID NO: 282 - protein, 106 aa, Artificial Sequence
  Description of Artificial Sequence: Synthetic light chain variable region amino acid sequence
SYVLTQPPSVSVSPGQTASITCSGDKLGDKYACWYQQKPGQSPVLVIYQDSKRPSGIPERFSGSNSGNTATLTISGTQAMDEADYYCQAWDSSTVVFGGGTKLTVL

SEQ ID NO: 283 - protein, 122 aa, Artificial Sequence
  Description of Artificial Sequence: Synthetic heavy chain variable region amino acid sequence
EVQLVESGGGLVKPGGSLRLSCAASGFTFSSYSMNWVRQAPGKGLEWVSSISSSSSFISYADSVKGRFTISRDSAKNSLYLQMNSLRAEDTAVYYCARDHPNWNGLAYFDYWGQGTLVTVSS

SEQ ID NO: 284 - protein, 111 aa, Artificial Sequence
  Description of Artificial Sequence: Synthetic light chain variable region amino acid sequence
QSVLTQPPSISGAPGQRVTISCTGSSSNIGAGYDVQWHQQLPGTAPKLLIYGNSNRPSGVPDRFSGSKSGTSASLAITGLQAEDEADYYCQSYDSSLSGWVFGGGTKLTVL

SEQ ID NO: 285 - protein, 124 aa, Artificial Sequence
  Description of Artificial Sequence: Synthetic heavy chain variable region amino acid sequence
EVQLLESGGGLVKPGGSLRLSCAASGFTFSSYSMNWVRQAPGKGLEWVSSISSSSSYIYYADSVKGRFTISRDNAKNSLYLQMNSLRAEDTAVYYCARDSCSGGSCYSPRFDPWGQGTLVTVSS

SEQ ID NO: 286 - protein, 108 aa, Artificial Sequence
  Description of Artificial Sequence: Synthetic light chain variable region amino acid sequence
QSVLTQPPSVSGAPGQRVTISCTGSSSNIGAGYDVHWYQQLPGTAPKLLIYGNSNRPSGVPDRFSGSKSGTSASLAITGLQAEDEADYYCQSYDSTVVFGGGTKLTVL

SEQ ID NO: 287 - protein, 129 aa, Artificial Sequence
  Description of Artificial Sequence: Synthetic heavy chain variable region amino acid sequence
EVQLQESGPGLVKPSETLSLTCTVSGGSISSSSYYWGWIRQPPGKGLEWIGSIYYSGSTYYNPSLKSRVTISVDTSKNQFSLKLSSVTAADTAVYYCARTPLYSYGRVVGFYYYGMDVWGQGTTVTVSS

SEQ ID NO: 288 - protein, 111 aa, Artificial Sequence
  Description of Artificial Sequence: Synthetic light chain variable region amino acid sequence
QSVLTQPPSVSGAPGQRVTISCTGSSSNIGAGYDVHWYQQLPGTAPKLLIYGNSNRPSGVPDRFSGSKSGTSASLAITGLQAEDEADYYCQSYDSSLSGWVFGGGTKLTVL

SEQ ID NO: 289 - protein, 126 aa, Artificial Sequence
  Description of Artificial Sequence: Synthetic heavy chain variable region amino acid sequence
QVQLVQSGAEVKKPGSSVKVSCKASGGTFSSYTISWVRQAPGQGLEWMGRIIPILGIANYAQKFQGRVTITADKSTSTAYMELSSLRSEDTAVYYCARDGGPYYYDSSGYYRLDYWGQGTLVTVSS

SEQ ID NO: 290 - protein, 112 aa, Artificial Sequence
  Description of Artificial Sequence: Synthetic light chain variable region amino acid sequence
DIRMTQSPLSLPVTLGQPASISCRSSQSLVYSDGNTYLNWFQQRPGQSPRRLIYKVSNRDSGVPDRFSGSGSGTDFTLKISRVEAEDVGVYYCMQGTHWTYTFGQGTKLEIK

SEQ ID NO: 291 - protein, 122 aa, Artificial Sequence
  Description of Artificial Sequence: Synthetic heavy chain variable region amino acid sequence
EVQLVESGGGLVKPGGSLRLSCAASGFTFSSYSMNWVRQAPGKGLEWVSSISSSSSYIYYADSVKGRFTISRDNAKNSLYLQMNSLRAEDTAVYYCARELYDYVWGSYRDYWGQGTLVTVSS

SEQ ID NO: 292 - protein, 111 aa, Artificial Sequence
  Description of Artificial Sequence: Synthetic light chain variable region amino acid sequence
QPGLTQPPSVSGAPGQRVTISCTGSSSNIGAGYDVHWYQQLPGTAPKLLIYGNSNRPSGVPDRFSGSKSGTSASLAITGLQAEDEADYYCQSYDSSLSGSVFGGGTKVTVL

SEQ ID NO: 293 - protein, 125 aa, Artificial Sequence
  Description of Artificial Sequence: Synthetic heavy chain variable region amino acid sequence
QVQLVQSGAEVKKPGASVKVSCKVSGYTLTELSMHWVRQAPGKGLEWMGGFDPEDGETIYAQKFQGRVTMTEDTSTDTAYMELSSLRSEDTAVYYCATEREEGGYSGYDDAFDIWGQGTMVTVSS

SEQ ID NO: 294 - protein, 107 aa, Artificial Sequence
  Description of Artificial Sequence: Synthetic light chain variable region amino acid sequence
DIRMTQSPSTLSASVGDRVTITCRASQSISSWLAWYQQKPGKAPKLLIYKASSLESGVPSRFSGSGSGTEFTLTISSLQPDDFATYYCQQYNSYSYTFGQGTKLEIK

SEQ ID NO: 295 - protein, 121 aa, Artificial Sequence
  Description of Artificial Sequence: Synthetic heavy chain variable region amino acid sequence
EVQLVESGGGLVKPGGSLRLSCAASGFTFSSYSMNWVRQAPGKGLEWVSSISSSSSYIYYADSVKGRFTISRDNAKNSLYLQMNSLRAEDTAVYYCARAPPSVGGWYFDLWGRGTLVTVSS

SEQ ID NO: 296 - protein, 108 aa, Artificial Sequence
  Description of Artificial Sequence: Synthetic light chain variable region amino acid sequence
QPVLTQPPSVSGAPGQRVTISCTGSSSNIGAGYDVHWYQQLPGTAPKLLIYGNSNRPSGVPDRFSGSKSGTSASLAITGLQAEDEADYYCQSYDSSLVFGGGTKLTVL

SEQ ID NO: 297 - protein, 119 aa, Artificial Sequence
  Description of Artificial Sequence: Synthetic heavy chain variable region amino acid sequence
QVQLQESGPGLVKPSQTLSLTCTVSGGSISSGSYYWSWIRQPAGKGLEWIGRIYTSGSTNYNPSLKSRVTISVDTSKNQFSLKLSSVTAADTAVYYCAREGRGGAFDIWGQGTLVTVSS

SEQ ID NO: 298 - protein, 108 aa, Artificial Sequence
  Description of Artificial Sequence: Synthetic light chain variable region amino acid sequence
SYELTQPPSVSVSPGQTARITCSADALPKQYAYWYQQKPGQAPVLVIYKDSERPSGIPERFSGSSSGTTVTLTISGVQAEDEADYYCQSADSSGTYVVFGGGTQLTVL

SEQ ID NO: 299 - protein, 124 aa, Artificial Sequence
  Description of Artificial Sequence: Synthetic heavy chain variable region amino acid sequence
QVQLVQSGPGLVKPSETLSLTCTVSGGSISSSSYYWGWIRQPPGKGLEWIGSIYYSGSTYYNPSLKSRVTISVDTSKNQFSLKLSSVTAADTAVYYCARSLMNYSNYVLGFDPWGQGTLVTVSS

SEQ ID NO: 300 - protein, 106 aa, Artificial Sequence
  Description of Artificial Sequence: Synthetic light chain variable region amino acid sequence
QPVLTQPPSVSVSPGQTASITCSGDKLGDKYACWYQQKPGQSPVLVIYQDSKRPSGIPERFSGSNSGNTATLTISGTQAMDEADYYCQAWDSSTVVFGGGTKLTVL

SEQ ID NO: 301 - protein, 121 aa, Artificial Sequence
  Description of Artificial Sequence: Synthetic heavy chain variable region amino acid sequence
EVQLVQSGAEVKKPGASVKVSCKASGYTFTSYGISWVRQAPGQGLEWMGWISAYNGNTNYAQKLQGRVTMTTDTSTSTAYMELRSLRSDDTAVYYCARDGIAAAGTLFDYWGQGTLVTVSS

SEQ ID NO: 302 - protein, 107 aa, Artificial Sequence
  Description of Artificial Sequence: Synthetic light chain variable region amino acid sequence
DIQLTQSPSSVSASVGDRVTITCRASQGISSWLAWYQQKPGKAPKLLIYAASSLQSGVPSRFSGSGSGTDFTLTISSLQPEDFATYYCQQANSFPLTFGGGTKVEIK

SEQ ID NO: 303 - protein, 118 aa, Artificial Sequence
  Description of Artificial Sequence: Synthetic heavy chain variable region amino acid sequence
EVQLVESGGGLVQPGGSLRLSCAASGFTFSSYAMSWVRQAPGKGLEWVSAISGSGGSTYYADSVKGRFTISRDNSKNTLYLQMNSLRAEDTAVYYCAKYSNYGSFDYWGQGTLVTVSS

SEQ ID NO: 304 - protein, 106 aa, Artificial Sequence
  Description of Artificial Sequence: Synthetic light chain variable region amino acid sequence
DIQMTQSPSTLSASVGDRVTITCRASQSISSWLAWYQQKPGKAPKLLIYKASSLESGVPSRFSGSGSGTEFTLTISSLQPDDFATYYCQQYNSYSTFGQGTKVEIK

SEQ ID NO: 305 - protein, 122 aa, Artificial Sequence
  Description of Artificial Sequence: Synthetic heavy chain variable region amino acid sequence
EVQLVESGGGLVQPGGSLRLSCAASGFTFSSYSMNWVRQAPGKGLEWVSYISSSSSTIYYADSVKGRFTISRDNAKNSLYLQMNSLRAEDTAVYYCAREGYSGSYGYYFDYWGQGTLVTVSS

SEQ ID NO: 306 - protein, 111 aa, Artificial Sequence
  Description of Artificial Sequence: Synthetic light chain variable region amino acid sequence
QSVLTQPPSVSGAPGQRVTISCTGSSSNIGAGYDVHWYQQLPGTAPKLLIYGNSNRPSGVPDRFSGSKSGTSASLAITGLQAEDEADYYCQSYDSSLSGSVFGTGTKLTVL

SEQ ID NO: 307 - protein, 122 aa, Artificial Sequence
  Description of Artificial Sequence: Synthetic heavy chain variable region amino acid sequence
QVQLVQSGAEVKKPGSSVKVSCKASGGTFSSYAISWVRQAPGQGLEWMGRIIPILGIANYAQKFQGRVTITADKSTSTAYMELSSLRSEDTAVYYCARGPLTGYSSSWFDPWGQGTLVTVSS

SEQ ID NO: 308 - protein, 108 aa, Artificial Sequence
  Description of Artificial Sequence: Synthetic light chain variable region amino acid sequence
EIVMTQSPSSLSASVGDRVTITCRASQSISSYLNWYQQKPGKAPKLLIYAASSLQSGVPSRFSGSGSGTDFTLTISSLQPEDFATYYCQQSYSTLPYTFGQGTKVEIK

SEQ ID NO: 309 - protein, 120 aa, Artificial Sequence
  Description of Artificial Sequence: Synthetic heavy chain variable region amino acid sequence
QVQLVQSGAEVKKPGASVKVSCKASGYTFTSYGISWVRQAPGQGLEWMGWISAYNGNTNYAQKLQGRVTMTTDTSTSTAYMELRSLRSDDTAVYYCARDEALVGATFDYWGQGTLVTVSS

SEQ ID NO: 310 - protein, 113 aa, Artificial Sequence
  Description of Artificial Sequence: Synthetic light chain variable region amino acid sequence
DIVMTQSPDSLAVSLGERATINCKSSQSVLYSSNNKNYLAWYQQKPGQPPKLLIYWASTRESGVPDRFSGSGSGTDFTLTISSLQAEDVAVYYCQQYYSTPRTFGQGTKVEIK

SEQ ID NO: 311 - protein, 124 aa, Artificial Sequence
  Description of Artificial Sequence: Synthetic heavy chain variable region amino acid sequence
EVQLVESGPGLVKPSGTLSLTCAVSGGSISSSNWWSWVRQPPGKGLEWIGEIYHSGSTNYNPSLKSRVTISVDKSKNQFSLKLSSVTAADTAVYYCARDVETDGYNYGYYFDYWGQGTLVTVSS

SEQ ID NO: 312 - protein, 108 aa, Artificial Sequence
  Description of Artificial Sequence: Synthetic light chain variable region amino acid sequence
SYELIQPPSVSVAPGKTARITCGGNNIGSKSVHWYQQKPGQAPVLVVYDDSDRPSGIPGRFSGSNSGNTATLTISRVEAGDEADYYCQVWDSSSDHKVFGGGTKLTVL

SEQ ID NO: 313 - protein, 120 aa, Artificial Sequence
  Description of Artificial Sequence: Synthetic heavy chain variable region amino acid sequence
QVQLQESGPGLVKPSETLSLTCTVSGGSISSSSYYWGWIRQPPGKGLEWIGSIYYSGSTYYNPSLKSRVTISVDTSKNQFSLKLSSVTAADTAVYYCARDRVVTTYFDYWGQGTLVTVSS

SEQ ID NO: 314 - protein, 108 aa, Artificial Sequence
  Description of Artificial Sequence: Synthetic light chain variable region amino acid sequence
SYELTQPPSVSVSPGQTARITCSGDALPKKYAYWYQQKSGQAPVLVIYEDSKRPSGIPERFSGSSSGTMATLTISGAQVEDEADYYCYSTDSSGNHRVFGGGTKLTVL

SEQ ID NO: 315 - protein, 123 aa, Artificial Sequence
  Description of Artificial Sequence: Synthetic heavy chain variable region amino acid sequence
EVQLLESGGGLVKPGGSLRLSCAASGFTFSSYSMNWVRQAPGKGLEWVSSISSSSSYIYYADSVKGRFTISRDNAKNSLYLQMNSLRAEDTAVYYCARELLDPGIAAAGFDYWGQGTLVTVSS

SEQ ID NO: 316 - protein, 112 aa, Artificial Sequence
  Description of Artificial Sequence: Synthetic light chain variable region amino acid sequence
QSVLTQPPSVSGAPGQRVTISCTGSSSNIGAGYDVHWYQQLPGTAPKLLIYGNSNRPSGVPDRFSGSKSGTSASLAITGLQAEDEADYYCQSYDSSLSVNYVFGTGTKVTVL

SEQ ID NO: 317 - protein, 121 aa, Artificial Sequence
  Description of Artificial Sequence: Synthetic heavy chain variable region amino acid sequence
EVQLVESGGGLVKPGGSLRLSCAASGFTFSSYSMNWVRQAPGKGLEWVSSISSSSSYIYYADSVKGRFTISRDNAKNSLYLQMNSLRAEDTAVYYCARDSGSYLSYAFDIWGQGTMVTVSS

SEQ ID NO: 318 - protein, 111 aa, Artificial Sequence
  Description of Artificial Sequence: Synthetic light chain variable region amino acid sequence
SYELTQPPSVSGAPGQRVTISCTGSSSNIGAGYDVHWYQQLPGTAPKLLIYGNSNRPSGVPDRFSGSKSGTSASLAITGLQAEDEADYYCQSYDSSLSGYVFGTGTKVTVL

SEQ ID NO: 319 - protein, 124 aa, Artificial Sequence
  Description of Artificial Sequence: Synthetic heavy chain variable region amino acid sequence
EVQLLESGGGLVQPGGSLRLSCAASGFTFSSYWMHWVRQAPGKGLVWVSRINSDGSSTSYADSVKGRFTISRDNAKNTLYLQMNSLRAEDTAVYYCARAPISILRFLGGYFDYWGQGTLVTVSS

SEQ ID NO: 320 - protein, 106 aa, Artificial Sequence
  Description of Artificial Sequence: Synthetic light chain variable region amino acid sequence
EIVMTQSPSTLSASVGDRVTITCRASQSISSWLAWYQQKPGKAPKLLIYKASSLESGVPSRFSGSGSGTEFTLTISSLQPDDFATYYCQQYNSYSSFGQGTKLEIK

SEQ ID NO: 321 - protein, 124 aa, Artificial Sequence
  Description of Artificial Sequence: Synthetic heavy chain variable region amino acid sequence
EVQLLESGGGLVKPGGSLRLSCAASGFTFSSYSMNWVRQAPGKGLEWVSSISSSSSYIYYADSVKGRFTISRDNAKNSLYLQMNSLRAEDTAVYYCARGYCSGGSCYSHYFQHWGQGTLVTVSS

SEQ ID NO: 322 - protein, 110 aa, Artificial Sequence
  Description of Artificial Sequence: Synthetic light chain variable region amino acid sequence
QSVLTQPASVSGSPGQSITISCTGTSSDVGGYNYVSWYQQHPGKAPKLMIYDVSNRPSGVSNRFSGSKSGNTASLTISGLQAEDEADYYCSSYTSSSTVVFGGGTKVTVL

SEQ ID NO: 323 - protein, 120 aa, Artificial Sequence
  Description of Artificial Sequence: Synthetic heavy chain variable region amino acid sequence
EVQLVESGGGLVKPGGSLRLSCAASGFTFSSYSMNWVRQAPGKGLEWVSSISSSSSYIYYADSVKGRFTISRDNAKNSLYLQMNSLRAEDTAVYYCARSQSGSYYSSDYWGQGTLVTVSS

SEQ ID NO: 324 - protein, 111 aa, Artificial Sequence
  Description of Artificial Sequence: Synthetic light chain variable region amino acid sequence
QSVLTQPPSVSGAPGQRVTISCTGSSSNIGAGYDVHWYQQLPGTAPKLLIYGNSNRPSGVPDRFSGSKSGTSASLAITGLQAEDEADYYCQSYDSSLSGWVFGGGTKVTVL

SEQ ID NO: 325 - protein, 123 aa, Artificial Sequence
  Description of Artificial Sequence: Synthetic heavy chain variable region amino acid sequence
EVQLLESGGGLVKPGGSLRLSCAASGFTFSSYSMNWVRQAPGKGLEWVSSISSSSSYIYYADSVKGRFTISRDNAKNSLYLQMNSLRAEDTAVYYCARQGYCSGGSCYHIDYWGQGTLVTVSS

SEQ ID NO: 326 - protein, 111 aa, Artificial Sequence
  Description of Artificial Sequence: Synthetic light chain variable region amino acid sequence
QSVVTQPPSVSGAPGQRVTISCTGSSSNIGAGYDVHWYQQLPGTAPKLLIYGNSNRPSGVPDRFSGSKSGTSASLAITGLQAEDEADYYCQSYDSSLSGWVFGGGTKLTVL

SEQ ID NO: 327 - protein, 123 aa, Artificial Sequence
  Description of Artificial Sequence: Synthetic heavy chain variable region amino acid sequence
EVQLVESGGGRVKPGGSLRLSCAASGFTFRSYSMNWVRQAPGKGLEWVSSISSSSSYINYADSVKGRFTISRDNAKNSLYLQMNSLRAEDTAVYYCARDGSGMTIFGVVIDYWGQGTLVTVSS

SEQ ID NO: 328 - protein, 110 aa, Artificial Sequence
  Description of Artificial Sequence: Synthetic light chain variable region amino acid sequence
QSVLTQPPSVSGAPGQRVTISCTGSSSNIGAGYDVHWYQQLPGTAPKLLIYGNSNRPSGVPDRFSGSKSGTSASLAITGLQAEDEADYYCQSYDRSLTVVFGGGTKLTVL

SEQ ID NO: 329 - protein, 120 aa, Artificial Sequence
  Description of Artificial Sequence: Synthetic heavy chain variable region amino acid sequence
QVQLVESGGGLVQPGGSLRLSCAASGFTVSSNYMSWVRQAPGKGLEWVSVIYSGGSTYYADSVKGRFTISRDNSKNTLYLQMNSLRAEDTAVYYCAREALGMDHWYFDLWGRGTLVTVSS

SEQ ID NO: 330 - protein, 108 aa, Artificial Sequence
  Description of Artificial Sequence: Synthetic light chain variable region amino acid sequence
SYELMQPPSVSVAPGKTARITCGGNNIGSKSVHWYQQKPGQAPVLVVYDDSDRPSGIPERFSGSNSGNTATLTISRVEAGDEADYYCQVWDSSSDHPVFGGGTKVTVL

SEQ ID NO: 331 - protein, 122 aa, Artificial Sequence
  Description of Artificial Sequence: Synthetic heavy chain variable region amino acid sequence
QVQLQQWGAGLLKPSETLSLTCAVYGGSFSGYYWSWIRQPPGKGLEWIGEINHSGSTNYNPSLKSRVTISVDTSKNQFSLKLSSVTAADTAVYYCARGGITAYYYYYGMDVWGQGTTVTVSS

SEQ ID NO: 332 - protein, 107 aa, Artificial Sequence; identical to SEQ ID NO: 54
  Description of Artificial Sequence: Synthetic light chain variable region amino acid sequence

SEQ ID NO: 333 - protein, 122 aa, Artificial Sequence
  Description of Artificial Sequence: Synthetic heavy chain variable region amino acid sequence
EVQLVESGGGLVKPGGSLRLSCAASGFTFSDYYMSWIRQAPGKGLEWVSYISSSGSTIYYADSVKGRFTISRDNAKNSLYLQMNSLRAEDTAVYYCASSLTVTSRSDAFDIWGQGTMVTVSS

SEQ ID NO: 334 - protein, 108 aa, Artificial Sequence
  Description of Artificial Sequence: Synthetic light chain variable region amino acid sequence
QPGLTQLPSVSVAPGKTARITCGGNNIGSKSVHWYQQKPGQAPVLVVYDDSDRPSGIPERFSGSNSGNTATLTISRVEAGDEADYYCQVWDSSSDHVVFGGGTKLTVL

SEQ ID NO: 335 - protein, 120 aa, Artificial Sequence
  Description of Artificial Sequence: Synthetic heavy chain variable region amino acid sequence
QITLKESGPTLVKPTQTLTLTCTFSGFSLSTSGVGVGWIRQPPGKALEWLALIYWDDDKRYSPSLKSRLTITKDTSKNQVVLTMTNMDPVDTATYYCAHAANWGYYFDYWGQGTLVTVSS

SEQ ID NO: 336 - protein, 106 aa, Artificial Sequence
  Description of Artificial Sequence: Synthetic light chain variable region amino acid sequence
DIVMTQSPSTLSASVGDRVTITCRASQSISSWLAWYQQKPGKAPKLLIYKASSLESGVPSRFSGSGSGTEFTLTISSLQPDDFATYYCQQYNSYWTFGQGTKVEIK

SEQ ID NO: 337 - protein, 118 aa, Artificial Sequence
  Description of Artificial Sequence: Synthetic heavy chain variable region amino acid sequence
QVQLQESGPGLVKPSQTLSLTCTVSGGSISSGDYYWSWIRQPPGKGLEWIGYIYYSGSTYYNPSLKSRVTISVDTSKNQFSLKLSSVTAADTAVYYCARDRLGIFDYWGQGTLVTVSS

SEQ ID NO: 338 - protein, 113 aa, Artificial Sequence
  Description of Artificial Sequence: Synthetic light chain variable region amino acid sequence
EIVLTQSPDSLAVSLGERATINCKSSQSVLYSSNNKNYLAWYQQKPGQPPKLLIYWASTRESGVPDRFSGSGSGTDFTLTISSLQAEDVAVYYCQQYYSTPWTFGQGTKVEIK

SEQ ID NO: 339 - protein, 120 aa, Artificial Sequence
  Description of Artificial Sequence: Synthetic heavy chain variable region amino acid sequence
EVQLVESGGGLVKPGGSLRLSCAASGFTFSSYSMNWVRQAPGKGLEWVSSISSSSSYIYYADSVKGRFTISRDNAKNSLYLQMNSLRAEDTAVYYCAREGSSSWYYFDYWGQGTLVTVSS

SEQ ID NO: 340 - protein, 112 aa, Artificial Sequence
  Description of Artificial Sequence: Synthetic light chain variable region amino acid sequence
QSVVTQPPSVSGAPGQRVTISCTGSSSNIGAGYDVHWYQQLPGTAPKLLIYGNSNRPSGVPDRFSGSKSGTSASLAITGLQAEDEADYYCQSYDSSLSGPWVFGGGTKLTVL

SEQ ID NO: 341 - protein, 122 aa, Artificial Sequence
  Description of Artificial Sequence: Synthetic heavy chain variable region amino acid sequence
EVQLVESGGGLVKPGGSLRLSCAASGFTFSSYSMNWVRQAPGKGLEWVSSISSSSSYIYYADSVKGRFTISRDNAKNSLYLQMNSLRAEDTAVYYCASLSSSSELGYYFDYWGQGTLVTVSS

SEQ ID NO: 342 - protein, 111 aa, Artificial Sequence
  Description of Artificial Sequence: Synthetic light chain variable region amino acid sequence
QPVLTQPPSVSGAPGQRVTISCTGSSSNIGAGYDVHWYQQLPGTAPKLLIYGNSNRPSGVPDRFSGSKSGTSASLAITGLQAEDEADYYCQSYDSSLSGYVFGTGTKLTVL

SEQ ID NO: 343 - protein, 121 aa, Artificial Sequence
  Description of Artificial Sequence: Synthetic heavy chain variable region amino acid sequence
EVQLVESGPGLVKPSETLSLTCTVSGGSISSSSYYWGWIRQPPGKGLEWIGSIYYSGSTYYNPSLKSRVTISVDTSKNQFSLKLSSVTAADTAVYYCARRDGYNYGWFDPWGQGTLVTVSS

SEQ ID NO: 344 - protein, 110 aa, Artificial Sequence
  Description of Artificial Sequence: Synthetic light chain variable region amino acid sequence
NFMLTQPHSVSESPGKTVTISCTGSSGSIASNYVQWYQQRPGSAPTTVIYEDNQRPSGVPDRFSGSIDSSSNSASLTISGLKTEDEADYYCQSYDSSNVVFGGGTKVTVL

SEQ ID NO: 345 - protein, 118 aa, Artificial Sequence
  Description of Artificial Sequence: Synthetic heavy chain variable region amino acid sequence
QVQLQESGPGLVKPSETLSLTCAVSGYSISSGYYWGWIRQPPGKGLEWIGSIYHSGSTYYNPSLKSRVTISVDTSKNQFSLKLSSVTAADTAVYYCARWTVMYYFDYWGQGTLVTVSS

SEQ ID NO: 346 - protein, 106 aa, Artificial Sequence
  Description of Artificial Sequence: Synthetic light chain variable region amino acid sequence
EIVMTQSPATLSLSPGERATLSCRASQSVSSYLAWYQQKPGQAPRLLIYDASNRATGIPARFSGSGSGTDFTLTISSLEPEDFAVYYCQQRSNWPTFGGGTKLEIK

SEQ ID NO: 347 - protein, 122 aa, Artificial Sequence
  Description of Artificial Sequence: Synthetic heavy chain variable region amino acid sequence
EVQLLESGGGVVQPGRSLRLSCAASGFTFSSYGMHWVRQAPGKGLEWVAVISYDGSNKYYADSVKGRFTISRDNSKNTLYLQMNSLRAEDTAVYYCAKGRGDFWSGYGMDVWGQGTTVTVSS

SEQ ID NO: 348 - protein, 106 aa, Artificial Sequence
  Description of Artificial Sequence: Synthetic light chain variable region amino acid sequence
SYELTQPPSVSVSPGQTASITCSGDKLGDKYACWYQQKPGQSPVLVIYQDSKRPSGIPERFSGSNSGNTATLTISGTQAMDEADYYCQAWDSSTAVFGGGTKVTVL

SEQ ID NO: 349 - protein, 121 aa, Artificial Sequence
  Description of Artificial Sequence: Synthetic heavy chain variable region amino acid sequence
EVQLVESGGGLVQPGGSLRLSCSASGFTFSSYAMHWVRQAPGKGLEYVSAISSNGGSTYYADSVKGRFTISRDNSKNTLYLQMSSLRAEDTAVYYCVKADQGSSGWFPDYWGQGTLVTVSS

SEQ ID NO: 350 - protein, 110 aa, Artificial Sequence
  Description of Artificial Sequence: Synthetic light chain variable region amino acid sequence
NFMLTQPHSVSESPGKTVTISCTRSSGSIASNYVQWYQQRPGSSPTTVIYEDNQRPSGVPDRFSGSIDSSSNSASLTISGLKTEDEADYYCQSYDSSNWVFGGGTKLTVL

SEQ ID NO: 351 - protein, 118 aa, Artificial Sequence
  Description of Artificial Sequence: Synthetic heavy chain variable region amino acid sequence
EVQLVESGAEVKKPGESLKISCKGSGYSFTSYWIGWVRQMPGKGLEWMGIIYPGDSDTRYSPSFQGQVTISADKSISTAYLQWSSLKASDTAMYYCARLIAAAGIDYWGQGTLVTVSS

SEQ ID NO: 352 - protein, 111 aa, Artificial Sequence
  Description of Artificial Sequence: Synthetic light chain variable region amino acid sequence
NFMLTQPHSVSESPGKTVTISCTRSSGSIASNYVQWYQQRPGSSPTTVIYEDNQRPSGVPDRFSGSIDSSSNSASLTISGLKTEDEADYYCQSYDSSNIWVFGGGTKVTVL

SEQ ID NO: 353 - protein, 120 aa, Artificial Sequence
  Description of Artificial Sequence: Synthetic heavy chain variable region amino acid sequence
QVQLVQSGAEVKKPGESLKISCKGSGYSFTSYWIGWVRQMPGKGLEWMGIIYPGDSDTRYSPSFQGQVTISADKSISTAYLQWSSLKASDTAMYYCARPYSGSYYAFDIWGQGTTVTVSS

SEQ ID NO: 354 - protein, 110 aa, Artificial Sequence
  Description of Artificial Sequence: Synthetic light chain variable region amino acid sequence
NFMLTQPHSVSESPGKTVTISCTRSSGSIASNYVQWYQQRPGSSPTTVIYEDNQRPSGVPDRFSGSIDSSSNSASLTISGLKTEDEADYYCQSYDSSNQVFGGGTKLTVL

SEQ ID NO: 355 - protein, 121 aa, Artificial Sequence
  Description of Artificial Sequence: Synthetic heavy chain variable region amino acid sequence
EVQLLESGAEVKKPGASVKVTCKASGYTFTHFGINWVRQAPGQGLEWLGWISAYNGNTNYVQKIQGRVTMTTDTSTNTAYMELRSLRSDDTAVYYCARGPPVEAAGTFDYWGQGTLVTVSS

SEQ ID NO: 356 - protein, 112 aa, Artificial Sequence
  Description of Artificial Sequence: Synthetic light chain variable region amino acid sequence
DIVLTQSPLSLPVTLGQPASISCRSSQSLVYSDGNTYLTWFQQRPGQSPRRLIYKVSNRDSGVPDRFSGSGSGTDFTLQISRVEAEDVGVYYCMQGTHWPFTFGPGTKVEIK

SEQ ID NO: 357 - protein, 125 aa, Artificial Sequence
  Description of Artificial Sequence: Synthetic heavy chain variable region amino acid sequence
QVQLVESGPTLVKPTQTLTLTCTFSGFSLSTSRVGVGWIRQPPGKALEWLALIYWDDDKRYSPSLKSRLTITKDTSKNQVVLTMTNMDPVDTARYYCAHRSTYDILGGYYYFDYWGQGTLVTVSS

SEQ ID NO: 358 - protein, 109 aa, Artificial Sequence
  Description of Artificial Sequence: Synthetic light chain variable region amino acid sequence
QPVLTQPRSVSGSPGQSVTISCTGTSSDVGGYNYVSWFQQHPGKAPKLMIYDVSKRPSGVPNRFSGSKSGNTASLTISGLQAEDEADYFCCSYAGTYEVFGGGTKLTVL

SEQ ID NO: 359 - protein, 120 aa, Artificial Sequence
  Description of Artificial Sequence: Synthetic heavy chain variable region amino acid sequence
QVQLVESGPGVVKPSETLSLTCTVSGGPVSSRSYYWGWIRQPPGKGLEWIGSIYYSGSTYYNTSLKSRVTISVDTSKNQFSLKLSSVTAADTAVYYCAKLQYSTSGFDYWGQGTLVTVSS

SEQ ID NO: 360 - protein, 110 aa, Artificial Sequence
  Description of Artificial Sequence: Synthetic light chain variable region amino acid sequence
QPVLTQPPSVSEAPRQRVTISCSGSSSNIGNNAVSWYQQLPGKAPKLLIYYDDLVPSGVSDRFSGSKSGTSASLAISGLQSEDEADYYCAAWDDSLNGVVFGGGTKLTVL

SEQ ID NO: 361 - protein, 119 aa, Artificial Sequence
  Description of Artificial Sequence: Synthetic heavy chain variable region amino acid sequence
QVQLVQSGAEVKKPGSSVKVSCKASGGTFSSNAINWVRQAPGQGLEWMGGIIPIFGTANYAQKFQGRVTITTDESTSTAYMELSSLRSEDTAVYYCATTFYYGSGADYWGQGTLVTVSS

SEQ ID NO: 362 - protein, 111 aa, Artificial Sequence
  Description of Artificial Sequence: Synthetic light chain variable region amino acid sequence
DIQMTQSPLSLPVTLGQPASISCRSSQSLVYSDGNMYLSWFQQRPGQSPRRLIYKVSNRDSGVPDRFSGSGSGTDFTLKISRVEAEDVGVYYCMQGTHWWTFGQGTKVEIK

SEQ ID NO: 363 - protein, 124 aa, Artificial Sequence
  Description of Artificial Sequence: Synthetic heavy chain variable region amino acid sequence
EVQLVESGGGLVKPGGSLRLSCAASGFTFSAYSMNWVRQAPGKGLEWVSSISSTTNYISYADSVKGRFTISRDNAKNSLYLQMNSLRAEDTAVYYCARDPKYYGLGTYYKDDYWGQGTLVTVSS

SEQ ID NO: 364 - protein, 111 aa, Artificial Sequence
  Description of Artificial Sequence: Synthetic light chain variable region amino acid sequence
NFMLTQPHSVSESPGKTVTISCTRSGGSIASNYVQWYQQRPGSSPTTVIYEDNQRPSGVPDRFSGSIDSSFNSASLTVSGLKTEDEADYYCQSFDNNNRWVFGGGTKLTVL

SEQ ID NO: 365 - protein, 123 aa, Artificial Sequence
  Description of Artificial Sequence: Synthetic heavy chain variable region amino acid sequence
EVQLVESGGVVVQPGGSLRLSCAASGFTFDDYTMHWVRQAPGKGLEWVSLISWDGGITYYADSVKGRFTISRDNSKNSLYLQMNSLRTEDTALYYCVKGGYYDGSGYYYFDYWGQGTLVTVSS

SEQ ID NO: 366 - protein, 107 aa, Artificial Sequence
  Description of Artificial Sequence: Synthetic light chain variable region amino acid sequence
DIQMTQSPSSLSASVGDRVTVTCRASQSISSYLNWYQHKPGNAPKLLIYAASSLQSGVPSRFSGSGSGTDFTLTISSLQPEDFATYYCQQSYSTPYTFGQGTKVEIK

SEQ ID NO: 367 - protein, 117 aa, Artificial Sequence
  Description of Artificial Sequence: Synthetic heavy chain variable region amino acid sequence
QVQLQQWGAGLLKPSETLSLTCGAFHGSFSGYYWSWIRQPPGKGLEWIGEVTHSRSTNYNPSLKSRITISVDTSRNQFSLKLNSVTAADTAVYYCARGSGEWYFDIWGRGTLVTVSS

SEQ ID NO: 368 - protein, 108 aa, Artificial Sequence
  Description of Artificial Sequence: Synthetic light chain variable region amino acid sequence
DIQLTQSPSTLSASVGDRVTITCRASQSISSWLAWYQQKPGRAPKLLIYKASSLESGVPSRFSGSGSGTEFTLTISSLQPDDFATYYCQQYNSYSPEIFGQGTKVEIK

SEQ ID NO: 369 - protein, 118 aa, Artificial Sequence
  Description of Artificial Sequence: Synthetic heavy chain variable region amino acid sequence
QVQLVQSGAEVKKPGESLKISCKGSGYSFTTYWIGWVRQMPGKGLEWMGIIFPGDSDTRYSPSFQGQVTISADKSISTAYLQWSSLKASDTAMYFCARSAFPFGFDIWGQGTMVTVSS

SEQ ID NO: 370 - protein, 111 aa, Artificial Sequence
  Description of Artificial Sequence: Synthetic light chain variable region amino acid sequence
SYVLTQPHSVSESPGKTVTISCTRSSGSIASNYVQWYQQRPGSSPTTVIYEDHQRPSGVPDRFSGSIDSSSNSASLTISGLQTEDEADYYCQSYGSGNPWVFGGGTKVTVL

SEQ ID NO: 371 - protein, 122 aa, Artificial Sequence
  Description of Artificial Sequence: Synthetic heavy chain variable region amino acid sequence
QVQLQESGSGLVKPSQTLSLTCVVSGGSISSGGNSWSWIRQPPGKGLEWIGYIYDSGNTYYNPSLKSRVTISVDRSKNQFSLKVSSVTAADTAVYYCARGAETGTTGWYDPWGQGTLVTVSS

SEQ ID NO: 372 - protein, 107 aa, Artificial Sequence
  Description of Artificial Sequence: Synthetic light chain variable region amino acid sequence
DIRLTQSPSSLSASVGDRVTITCRASQTISSYLNWYQQKPGKAPRLLIYAASSLQSGVPSRFSGSGSGTDFTLTISSLQPEDFATYYCQQSYGTPRTFGQGTKVEIK

SEQ ID NO: 373 - protein, 126 aa, Artificial Sequence
  Description of Artificial Sequence: Synthetic heavy chain variable region amino acid sequence
QVQLQESGPGLVKPSQTLSLSCTVSGGSISSTNYYWTWIRQHPGKGLEWIGFIYNRGSTYYNPSLTSRVTISVDTSKNQFSLKLTSVTAADTAVYYCARAPYYYDRNGYYTAFDIWGQGTTVTVSS

SEQ ID NO: 374 - protein, 107 aa, Artificial Sequence
  Description of Artificial Sequence: Synthetic light chain variable region amino acid sequence
EIVLTQSPATLSVSPGERATLSCRASQSVSSNLAWYQQKPGQAPRLLIYDASTRATDIPARFSGGGSGTEFTLTISSLQSEDFAVYYCQQYNNWPRTFGLGTKVDIK

SEQ ID NO: 375 - protein, 120 aa, Artificial Sequence
  Description of Artificial Sequence: Synthetic heavy chain variable region amino acid sequence
QVQLQESGPGLVKPSETLSLTCSVSGGSLTSYYWSWIRQPPGKGLEWIGYIYYSGSTNYNPSLKSRLTISVDTSKNQFSLKLSSVTAADTAVYYCARVGGRGVINVFDYWGQGTLVTVSS

SEQ ID NO: 376 - protein, 111 aa, Artificial Sequence
  Description of Artificial Sequence: Synthetic light chain variable region amino acid sequence
QPVLTQPASVSGSPGQSITISCTGTSSDVGGYNYVSWYQQHPGKAPKLMIYEVSNRPSGVSNRFSGSKSGNTASLTISGLQAEDEADYYCDSYRSNSASVVFGGGTKLTVL

SEQ ID NO: 377 - protein, 126 aa, Artificial Sequence
  Description of Artificial Sequence: Synthetic heavy chain variable region amino acid sequence
QVTLKESGPALVKPTQTLTLTCTFSGLSISTSGMCVSWIRQPPGKALEWLARIDWDDDKYYSTSLKTRLTISKDTSKNQVVLTMTNMDPVDTATYYCARINYYDSSGYYVYYFDYWGQGTLVTVSS

SEQ ID NO: 378 - protein, 108 aa, Artificial Sequence
  Description of Artificial Sequence: Synthetic light chain variable region amino acid sequence
DIQMTQSPSSLSASVGDRVTITCRASQSISSYLNWYQQKPGKAPKLLIYAASSLQSGVPSRFSGSGSGTDFTLTISSLQPEDFATYYCQQSYSTPPFTFGPGTKVDIK

SEQ ID NO: 379 - protein, 124 aa, Artificial Sequence
  Description of Artificial Sequence: Synthetic heavy chain variable region amino acid sequence
QVQLVQSGAEVKKPGASVKVSCKVSGYTLTELSMHWVRQAPGKGLEWMGGFDPEDGETIYAQKFQGRVTMTEDTSTDTAYMELSSLRSEDTAVYYCATARFLEWLSGTNWFDPWGQGTLVTVSS

SEQ ID NO: 380 - protein, 112 aa, Artificial Sequence
  Description of Artificial Sequence: Synthetic light chain variable region amino acid sequence
DIQLTQSPLSLPVTPGEPASISCRSSQSLLHSNGYNYLDWYLQKPGQSPQLLIYLGSNRASGVPDRFSGSGSGTDFTLKISRVEAEDVGVYYCMQALQTPPTFGGGTKVEIK

SEQ ID NO: 381 - protein, 124 aa, Artificial Sequence
  Description of Artificial Sequence: Synthetic heavy chain variable region amino acid sequence
QITLKESGPALVKPTQTLTLTCTFSGFSLSTSGMCVSWIRQPPGKALEWLARIDWDDDKYYSTSLKTRLTISKDTSKNQVVLTMTNMDPVDTATYYCARMCWGNYVPIDAFDIWGQGTMVTVSS

SEQ ID NO: 382 - protein, 107 aa, Artificial Sequence
  Description of Artificial Sequence: Synthetic light chain variable region amino acid sequence
DIQLTQSPSSLSASVGDRVTITCRASQGIRNDLGWYQQKPGKAPKRLIYAASSLQSGVPSRFSGSGSGTEFTLTISSLQPEDFATYYCLQHNSYPPTFGQGTKVDIK

SEQ ID NO: 383 - protein, 120 aa, Artificial Sequence
  Description of Artificial Sequence: Synthetic heavy chain variable region amino acid sequence
EVQLVESGGGLVKPGGSLRLSCAASGFTFSNAWMSWVRQAPGKGLEWVGRIKSKTDGGTTDYAAPVKGRFTISRDDSKNTLYLQMNSLKTEDTAVYYCTTDSSSGGMDVWGQGTTVTVSS

SEQ ID NO: 384 - protein, 112 aa, Artificial Sequence
  Description of Artificial Sequence: Synthetic light chain variable region amino acid sequence
DIVLTQSPLSLPVTPGEPASISCRSSQSLLHSNGYNYLDWYLQKPGQSPQLLIYLGSNRASGVPDRFSGSGSGTDFTLKISRVEAEDVGVYYCMQALQTPLTFGGGTKVDIK

SEQ ID NO: 385 - protein, 123 aa, Artificial Sequence
  Description of Artificial Sequence: Synthetic heavy chain variable region amino acid sequence
QVQLVQSGPTLVKPTQTLTLTCTFSGFSLSTSGVGVGWIRQPPGKALEWLALIYWDDDKRYSPSLKSRLTITKDTSKNQVVLTMTNMDPVDTATYYCAHRRATTVTTGYFDYWGQGTLVTVSS

SEQ ID NO: 386 - protein, 112 aa, Artificial Sequence
  Description of Artificial Sequence: Synthetic light chain variable region amino acid sequence
QSVLTQPPSVSGAPGQRVTISCTGSSSNIGAGYDVHWYQQLPGTAPKLLIYGNSNRPSGVPDRFSGSKSGTSASLAITGLQAEDEADYYCQSYDSSLSGHYVFGTGTKVTVL

SEQ ID NO: 387 - protein, 118 aa, Artificial Sequence
  Description of Artificial Sequence: Synthetic heavy chain variable region amino acid sequence
QVQLVQSGAEVKKPGESLKISCKGSGYRFTSYWIGWVRQMPGKGLEWMGIIYPGDSDTRYSPSFQGQVTISADKSISTAYLQWSSLKASDTAMYYCARSGSHYAFDLWGQGTMVTVSS

SEQ ID NO: 388 - protein, 111 aa, Artificial Sequence
  Description of Artificial Sequence: Synthetic light chain variable region amino acid sequence
NFMLTQPHSVSESPGKTVTISCTRSSGNIASNYVQWYQQRPGSSPTTVLYEDNQRPSGVPDRFSGSIDSSSNSASLTISGLKTEDEADYYCQSYDSSNPWVFGGGTKLTVL

SEQ ID NO: 389 - protein, 122 aa, Artificial Sequence
  Description of Artificial Sequence: Synthetic heavy chain variable region amino acid sequence
QVQLQQWGAGLLKPSETLSLTCAVYGGSFSGYYWSWIRQPPGKGLEWIGEINHSGSTNYNPSLKSRVTISVDTSKNQFSLKLSSVTAADTAVYYCARLIENTRVGEYYFDYWGQGTLVTVSS

SEQ ID NO: 390 - protein, 106 aa, Artificial Sequence
  Description of Artificial Sequence: Synthetic light chain variable region amino acid sequence
SYELTQPPSVSVSPGQTASITCSGDKLGDKYACWYQQKPGQSPVLVIYQDSKRPSGIPERFSGSNSGNTATLTISGTQAMDEADYYCQAWDSSTVVFGGGTQLTVL

SEQ ID NO: 391 - protein, 126 aa, Artificial Sequence
  Description of Artificial Sequence: Synthetic heavy chain variable region amino acid sequence
QVQLVQSGAEVKKPGSSVKVSCKASGGTFSSYVISWVRQAPGQGLEWMGGIIPIFGTTYYAQKFQDRVTITTDESTSTAYMELSSLRSEDTAVYYCARDLRYRYNAYDGADAFDIWGQGTTVTVSS

SEQ ID NO: 392 - protein, 110 aa, Artificial Sequence
  Description of Artificial Sequence: Synthetic light chain variable region amino acid sequence
QSALTQPASVSGSPGQSITISCTGTSSDVGGYNYVSWYQQHPGKAPKLMIFEVSNRPSGVSNRFSGSKSGNTASLTISGLQAEDEADYYCTSYTKSNSVVFGGGTKLTVL

SEQ ID NO: 393 - protein, 117 aa, Artificial Sequence
  Description of Artificial Sequence: Synthetic heavy chain variable region amino acid sequence
QVQLQESGPGLVKPSETLSLTCTVSGGSISSYYWSWIRQPPGKGLEWIGYIYTSGSTNYNPSLKSRVTISVDTSKNQFSLKLSSVTAADTAVYYCARVGSYYDLQHWGQGTLVTVSS

SEQ ID NO: 394 - protein, 107 aa, Artificial Sequence; identical to SEQ ID NO: 302
  Description of Artificial Sequence: Synthetic light chain variable region amino acid sequence

SEQ ID NO: 395 - protein, 124 aa, Artificial Sequence
  Description of Artificial Sequence: Synthetic heavy chain variable region amino acid sequence
EVQLVESGGGVVQPGGSLRLSCAASGFTFSSYGMHWVRQAPGKGLEWVAFIRYDGSNKYYADSVKGRFTISRDNSKSTLYLQMNSLRAEDTAVYYCAKDATFGYSSSWYNFDYWGQGTLVTVSS

SEQ ID NO: 396 - protein, 112 aa, Artificial Sequence
  Description of Artificial Sequence: Synthetic light chain variable region amino acid sequence
DIQMTQSPDSLAVSLGERATINCKSSQSVLFSSNNKNYLAWYQQKPGQPPKLLIYWASTRESGVPDRFSGSGSGTDFTLTISSLQAEDVAVYYCQQYYSTPTFGQGTKVEIK

SEQ ID NO: 397 - protein, 117 aa, Artificial Sequence
  Description of Artificial Sequence: Synthetic heavy chain variable region amino acid sequence
QVQLVQSGAEVKKPGASVKVSCKASGYTFTSYYMHWVRQAPGQGLEWMGIINPSGGSTSYAQKFQGRVTMTRDTSTSTVYMELSSLRSEDTAVYYCSRGYSYGYDYWGQGTLVTVSS

SEQ ID NO: 398 - protein, 110 aa, Artificial Sequence; identical to SEQ ID NO: 350
  Description of Artificial Sequence: Synthetic light chain variable region amino acid sequence

SEQ ID NO: 399 - protein, 121 aa, Artificial Sequence
  Description of Artificial Sequence: Synthetic heavy chain variable region amino acid sequence
EVQLVESGGGLVQPGGSLRLSCAASGFTVSSNYMSWVRQAPGKGLEWVSVIYSGGSAYYADSVKGRFTISRDNSKNTLYLQMNSLRAEDTAVYYCAREARISPPQGAFDIWGQGTMVTVSS

SEQ ID NO: 400 - protein, 108 aa, Artificial Sequence
  Description of Artificial Sequence: Synthetic light chain variable region amino acid sequence
SYVLTQPPSVSVSPGQTARITCSGDALPKQYAYWYQQKPGQAPVLVIYKDSERPSGIPERFSGSSSGTTVTLTISGVQAEDEADYYCQSADSSGTLYVFGTGTKVTVL

SEQ ID NO: 401 - protein, 120 aa, Artificial Sequence
  Description of Artificial Sequence: Synthetic heavy chain variable region amino acid sequence
EVQLLESGPGLVKPSETLSLTCTVSGGSISSSSYYWGWIRQPPGKGLEWIGSIYYSGSTYYNPSLKSRVTISVDTSKNQFSLKLSSVTAADTAVYYCAVLLYSSSSFDYWGQGTLVTVSS

SEQ ID NO: 402 - protein, 111 aa, Artificial Sequence
  Description of Artificial Sequence: Synthetic light chain variable region amino acid sequence
NFMLTQPHSVSESPGKTVTISCTRSSGSIASNYVQWYQQRPGSSPTTVIYEDNQRPSGVPDRFSGSIDSSSNSASLTISGLKTEDEADYYCQSYDSSNQAVFGGGTQLTVL

SEQ ID NO: 403 - protein, 119 aa, Artificial Sequence
  Description of Artificial Sequence: Synthetic heavy chain variable region amino acid sequence
EVQLVESGGGLVQPGGSLRLSCAASGFTFSSYSMNWVRQAPGKGLEWVSYISSSSSTIYYADSVKGRFTISRDNAKNSLYLQMNSLRAEDTAVYYCARGNTVTTFLDYWGQGTLVTVSS

SEQ ID NO: 404 - protein, 108 aa, Artificial Sequence
  Description of Artificial Sequence: Synthetic light chain variable region amino acid sequence
DIRLTQSPSSFSASTGDRVTITCRASQGISSYLAWYQQKPGKAPKLLIYAASTLQSGVPSRFSGSGSGTDFTLTISCLQSEDFATYYCQQYYSYPPLTFGGGTKVDIK

SEQ ID NO: 405 - protein, 122 aa, Artificial Sequence
  Description of Artificial Sequence: Synthetic heavy chain variable region amino acid sequence
QVQLVQSGAEVKKPGASVKVSCKASGYAFTNYGVSWVRQAPGQGLEWMGWISVYNGNTNYAQKLQGRVTMTTDTSTSTAYMELRSLRSDDTALYYCARDPPSEGAAGLFDYWGQGTLVTISS

SEQ ID NO: 406 - protein, 112 aa, Artificial Sequence
  Description of Artificial Sequence: Synthetic light chain variable region amino acid sequence
DIVMTQSPLSLPVTLGQPASFSCRSSQSLVYSDGNTYLSWFQQRPGQSPRRLIYKVSNRDSGVPDRFSGSGSGTDFTLKISRVEAEDVGVYYCMQGTHWPCTFGQGTKVEIK

SEQ ID NO: 407 - protein, 124 aa, Artificial Sequence
  Description of Artificial Sequence: Synthetic heavy chain variable region amino acid sequence
EVQLVESGGGVVQPGGSLRLSCAASGFTFSSDGMHWVRQAPGKGLEWVAFIQYDGTNKYYVDSVKGRFTISRDNSKNTLYLQMNSLRAEDTAVYYCAKDQGFRYSSSWYAFDIWGQGTMVTVSS

SEQ ID NO: 408 - protein, 112 aa, Artificial Sequence
  Description of Artificial Sequence: Synthetic light chain variable region amino acid sequence
EIVMTQSPDSLAVSLGERATINCKSSQSVLFNSNNKNYLAWYQQKPGQPPKLLIYWASTRESGVPDRFSGSGSGTDFTLTISSLQAEDVAVYYCQQYYSTPTFGQGTRLEIK

SEQ ID NO: 409 - protein, 126 aa, Artificial Sequence
  Description of Artificial Sequence: Synthetic heavy chain variable region amino acid sequence
QVQLVQSGAEVKKPGASVKVSCKASGYTFTSYYMHWVRQAPGQGLEWMGIINPSGGSTSYAQKFQGRVTMTRDTSTSTVYMELSSLRSEDTAVYYCARDSLVNCSGGSCPGGPDYWGQGTLVTVSS

SEQ ID NO: 410 - protein, 108 aa, Artificial Sequence
  Description of Artificial Sequence: Synthetic light chain variable region amino acid sequence
SYVLTQPPSVSVSPGQTARITCSGDALPKKYAYWYQQKSGQAPVLVIYEDSKRPSGIPERFSGSSSGTMATLTISGAQVEDEADYYCYSTDSSGNHRVFGGGTKLTVL

SEQ ID NO: 411 - protein, 123 aa, Artificial Sequence
  Description of Artificial Sequence: Synthetic heavy chain variable region amino acid sequence
QVQLVQSGAEVKKPGESLKISCKGSGYSFTNYWIGWVRQMPGKGLEWMGITYPGDSDTRYSPSFQGQVTISADKSISTAHLQWDSLKASDTAMYYCARLRCTGSICYDAFDIWGQGTTVTVSS

SEQ ID NO: 412 - protein, 108 aa, Artificial Sequence
  Description of Artificial Sequence: Synthetic light chain variable region amino acid sequence
SYVLTQPLSVSVALGQTARITCGGNNIGSKNVHWYQQKPGQAPVLVIYRDNNRPSGIPERFSGSNSGNTATLTISRAQAGDEADYYCQVWDSSTGGDVFGAGTKVTVL

SEQ ID NO: 413 - protein, 128 aa, Artificial Sequence
  Description of Artificial Sequence: Synthetic heavy chain variable region amino acid sequence
QVQLVQSGAEVKKPGASVKVSCKASGYTFTSYGISWVRQAPGQGLEWMGWISAYNGNTNYAQKLQGRVTMTTDTSTSTAYMELRSLRSDDTAVYYCARVRSVGRFGELLYYYYGMDVWGQGTTVTVSS

SEQ ID NO: 414 - protein, 112 aa, Artificial Sequence
  Description of Artificial Sequence: Synthetic light chain variable region amino acid sequence
DIRLTQSPLSLPVTPGEPASISCRSSQSLLHSNGYNYLDWYLQKPGQSPQLLIYLGSNRASGVPDRFSGSGSGTDFTLKISRVEAEDVGVYYCMQALQTPWTFGQGTKLEIK

SEQ ID NO: 415 - protein, 122 aa, Artificial Sequence
  Description of Artificial Sequence: Synthetic heavy chain variable region amino acid sequence
EVQLVESGGGLVKPGGSLRLSCAASGFTFSSYSMNWVRQAPGKGLEWVSSISSSSSYIYYADSVKGRFTISRDNAKNSLYLQMNSLRAEDTAVYYCAREVLTGDYLGWFDPWGQGTLVTVSS

SEQ ID NO: 416 - protein, 109 aa, Artificial Sequence
  Description of Artificial Sequence: Synthetic light chain variable region amino acid sequence
QSVVTQPPSVSGAPGQRVTISCTGSSSNIGAGYDVHWYQQLPGTAPKLLIYGNSNRPSGVPDRFSGSKSGTSASLAITGLQAEDEADYYCQSYDSSHWVFGGGTKLTVL

SEQ ID NO: 417 - protein, 124 aa, Artificial Sequence
  Description of Artificial Sequence: Synthetic heavy chain variable region amino acid sequence
EVQLVESGGGLVKPGGSLRLSCAASGFTFSSYSMNWVRQAPGKGLEWVSSISSSSSYIYYADSVKGRFTISRDNAKNSLYLQMNSLRAEDTAVYYCASSRRSLTGDRGGWFDPWGQGTLVTVSS

SEQ ID NO: 418 - protein, 111 aa, Artificial Sequence; identical to SEQ ID NO: 288
  Description of Artificial Sequence: Synthetic light chain variable region amino acid sequence

SEQ ID NO: 419 - protein, 122 aa, Artificial Sequence
  Description of Artificial Sequence: Synthetic heavy chain variable region amino acid sequence
EVQLVESGGGLVKPGGSLRLSCAASGFSLSSYYMNWVRQAPGKGLEWVSSISSSSTYINYADSVKGRFTISRDNAKNSLYLQMNSLRAEDTAVYYCARGGSITIFGVVFDSWGQGTLVTVSS

SEQ ID NO: 420 - protein, 111 aa, Artificial Sequence
  Description of Artificial Sequence: Synthetic light chain variable region amino acid sequence
SYELTQPPSVSGAPGQRVTISCTGTSSNIGAGYDVHWYQQLPGTAPKLLIYVNSNRPSGVPDRFSGSKSGTSASLAITGLQAEDEADYYCQSYDSSLSGGVFGTGTKVTVL

SEQ ID NO: 421 - protein, 128 aa, Artificial Sequence
  Description of Artificial Sequence: Synthetic heavy chain variable region amino acid sequence
QITLKESGPTLVKPTQTLTLTCTFSGFSLSTSGVGVGWIRQPPGKALEWLALIYWDDDKRYSPSLKSRLTITKDTSKNQVVLTMTNMDPVDTATYYCAHSVYYDFWSGYYVPNYFDYWGQGTLVTVSS

SEQ ID NO: 422 - protein, 107 aa, Artificial Sequence
  Description of Artificial Sequence: Synthetic light chain variable region amino acid sequence
DIQMTQSPSSLSASVGDRVTITCRASQGIRNDLGWYQQKPGKAPKRLIYAASSLQSGVPSRFSGSGSGTEFTLTISSLQPEDFATYYCLQHNSYPLTFGGGTKVEIK

SEQ ID NO: 423 - protein, 121 aa, Artificial Sequence
  Description of Artificial Sequence: Synthetic heavy chain variable region amino acid sequence
EVQLLESGAEVKKPGASVKVSCKTSGYTFSNYGVSWVRQAPGQGLEWLGWISAYNGNTNYAQKLQGRVTMTTDSSTSTAYMEVRSLRSDDTAVYYCARDVAPVAASLFDYWGQGTLVTVSS

SEQ ID NO: 424 - protein, 112 aa, Artificial Sequence
  Description of Artificial Sequence: Synthetic light chain variable region amino acid sequence
DIRLTQSPLSLPVTLGQPASISCRSSQSLEFTDGNTYLSWFQQRPGQSPRRLIYKVSNRDSGVPDRFSGSGSGTDFTLKINRVEAEDVGVYYCMQGIHWPPTFGPGTKVEIK

SEQ ID NO: 425 - protein, 117 aa, Artificial Sequence
  Description of Artificial Sequence: Synthetic heavy chain variable region amino acid sequence
QVQLQQWGAGVLKPSETLSLTCAVNGRSLSGHYWSWIRQTPGKGLEWIGEINNSGGTHYSPSLKSRVIISGDTAKNQLSLKLSSVTAADTAVYYCAKGSAEWYFDLWGRGTLVTVSS

SEQ ID NO: 426 - protein, 108 aa, Artificial Sequence
  Description of Artificial Sequence: Synthetic light chain variable region amino acid sequence
DIRVTQSPSTLSASVGDRVTITCRASQSVSTWLAWYQQKPGKPPSLLIFKASTLESGVPSRFSGSGSGTEFTLTISSLQPDDFATYYCQQYNTYSPWTFGPGTKVEIK

SEQ ID NO: 427 - protein, 124 aa, Artificial Sequence
  Description of Artificial Sequence: Synthetic heavy chain variable region amino acid sequence
QVQLVESGGGLVKPGGSLRLSCAASGFKFSSYYMHWVRQAPGKGLEWVSSVSGGSTYTSYADSVKGRFTISRDNAKHSLFLQLNSLRAEDTAVYHCVRGDYHPSGTSLNWFDPWGQGTLVTVSS

SEQ ID NO: 428 - protein, 111 aa, Artificial Sequence
  Description of Artificial Sequence: Synthetic light chain variable region amino acid sequence
QPGLTQPPSVSGAPGQRVTISCTGSSSNIGAGYDVHWYKQLPGTVPKLLIYANNNRPSGVPDRFSGSESGTSASLAITGLQAEDEADYYCQSYDSSLNAYVFGTGTKVTVL

SEQ ID NO: 429 - protein, 122 aa, Artificial Sequence
  Description of Artificial Sequence: Synthetic heavy chain variable region amino acid sequence
QVQLVQSGAEVKKPGASVKVSCKASGYTFSHYGLSWVRQAPGQGLEWMGWISAYNHNTNYAQKFQGRVTITTDTSTSTAYLEMRSLRSDDTAVYYCAREPPSDTAAGTGDYWGQGTLVTVSS

SEQ ID NO: 430 - protein, 112 aa, Artificial Sequence
  Description of Artificial Sequence: Synthetic light chain variable region amino acid sequence
DIVMTQSPLSLSVTLGQPASISCRSSQSLVYSDGNTYLTWFQQRPGQSPRRLIYKVSNRDSGVPDRFSGSGSGTDFTLKISRVEAEDVGVYYCMQGTQWPRTFGQGTKVDIK

SEQ ID NO: 431 - protein, 125 aa, Artificial Sequence
  Description of Artificial Sequence: Synthetic heavy chain variable region amino acid sequence
EVQLVESGGGLAKPGGSLRLSCAASGFTFSHYNMNWVRQAPGKGLEWVSSISSTGFHIYYADSVKGRFVISRDNAENSLHLQMNSLRADDTGLYYCVRAEYYYGSGSAGHYFDSWGQGTLVTVSS

SEQ ID NO: 432 - protein, 109 aa, Artificial Sequence
  Description of Artificial Sequence: Synthetic light chain variable region amino acid sequence
SYVLTQPPSVSVAPGHTAKITCGGSIIGTKSVHWYQQKPGQAPVLVVYDDSDRPSGIPERLSGSRSGNTATLTITRVEAGDEADYYCQVWDSSSEHAGVFGGGTKLTVL

SEQ ID NO: 433 - protein, 121 aa, Artificial Sequence
  Description of Artificial Sequence: Synthetic heavy chain variable region amino acid sequence
QVQLVQSGAEVKKPGASVKVSCKASGYTFTHYGISWVRQAPGQGLEWMGWISAYNGNTNYAQKLQGRVTMTTDTSTSTAYMEVRSLRYDDTAVYYCARDVPVEAATSPEFWGQGTLVTVSS

SEQ ID NO: 434 - protein, 113 aa, Artificial Sequence
  Description of Artificial Sequence: Synthetic light chain variable region amino acid sequence
DIVMTQTPLSLPVTLGQPASISCRSSQSLVYSDGNTYLSWFQQRPGQSPRRLIYKVSNRDSGVPNRFSGSGSGTDFTLKISRVEAEDVGVYYCVQNTHWPAYTFGQGTKVEIK

SEQ ID NO: 435 - protein, 123 aa, Artificial Sequence
  Description of Artificial Sequence: Synthetic heavy chain variable region amino acid sequence
QVQLVQSGAEVKKPGASVKVSCKASGYNFTNYGISWVRQAPGQGLEWMGWISTSNGNTHYAQKSQGRITLTTDTSTNTAYMEVRSLRSDDTAVYYCAREGPESTYDWYHFDSWGQGTLVTVSS

SEQ ID NO: 436 - protein, 108 aa, Artificial Sequence
  Description of Artificial Sequence: Synthetic light chain variable region amino acid sequence
QSVVTQPPSVSVAPGQTAKITCGGNNIGSKTVHWYQLKAGQAPVLVVYDDSDRPSGIPERFSGSNSGNTATLTIRRVEAGDEADYFCQVWESASDHWVFGGGTKLTVL

SEQ ID NO: 437 - protein, 122 aa, Artificial Sequence
  Description of Artificial Sequence: Synthetic heavy chain variable region amino acid sequence
EVQLLESGGGLGKPGGSLRLSCAASGFKLSSYYMHWVRQAPGKGPEWVSSISASSSYINYADSVRGRFTVSRDNAKNSLFLQMNSLRVDDTAIYYCARGAPLTNFGMVLDSWGQGTLVTVSS

SEQ ID NO: 438 - protein, 110 aa, Artificial Sequence
  Description of Artificial Sequence: Synthetic light chain variable region amino acid sequence
QSVLTQPPSVSGAPGQRVTISCTGSGSNIGAGYDVHWYQQVPGRVPKLLIYANNNRPSGVPDRFSGSKSGTSASLAITGLQADDEADYYCQSYDRSLNVVFGGGTKLTVL

SEQ ID NO: 439 - protein, 119 aa, Artificial Sequence
  Description of Artificial Sequence: Synthetic heavy chain variable region amino acid sequence
EVQLLESGGGVVQPGRSVRLSCAASGFSFSSYALHWVRQAPGKGLEWVGVIWYEESNKYYADPVKGRFTISRDNSKNTLYLQMNSLRDEDTAVYYCARKGVATAGLDYWGQGTLVTVSS

SEQ ID NO: 440 - protein, 112 aa, Artificial Sequence
  Description of Artificial Sequence: Synthetic light chain variable region amino acid sequence
EIVLTQSPLSLPVTPGEPASISCRSSQSLLNSNGYNYLDWYLQKPGQSPQLLIYLGSNRASGVPDRFSGSGSGTDFTLKISRVEAEDVGVYYCMQALQTPQTFGPGTKVDIK

SEQ ID NO: 441 - protein, 125 aa, Artificial Sequence
  Description of Artificial Sequence: Synthetic heavy chain variable region amino acid sequence
QVQLQQWGAGLLKPSETLSLTCAMYGGSFSDDYWSWIRQPPGKGLEWIGEVNHGGSTNYNTSLKSRVTISADTSKKQFSLKLRSVTAADTAVYFCARGWRYCNATTCYSKAFDIWGQGTMVTVSS

SEQ ID NO: 442 - protein, 107 aa, Artificial Sequence
  Description of Artificial Sequence: Synthetic light chain variable region amino acid sequence
DIQMTQSPSSLSASVGDRVTITCQASQDIDIYLIWYQQKPGRAPKLLIYDASNLKTGVPSRFSGSGSGTEFTFTINNLQPEDFATYYCQQFHDLPLTFGGGTKLEIK

SEQ ID NO: 443 - protein, 125 aa, Artificial Sequence
  Description of Artificial Sequence: Synthetic heavy chain variable region amino acid sequence
EVQLVESGGGLVKPGGSLRLSCAASGFKFSSYTMNWVRQAPGKGLEWVSSVSASSSYIFYADSVQGRFIISRDNAQNSLYLQMNSLRADDTAVYYCARDQYGPGHYYNPAWFDPWGQGTLVTVSS

SEQ ID NO: 444 - protein, 110 aa, Artificial Sequence
  Description of Artificial Sequence: Synthetic light chain variable region amino acid sequence
QPVLTQPPSVSGAPGQRVTISCTGTSSNIGAGYDVHWYKQLPGTAPKVLIYGNTNRPSGIPDRFSGSKSGTSASLAITGLKAEDEADYYCQSYDRSGSKVFGTGTKLTVL

SEQ ID NO: 445 - protein, 131 aa, Artificial Sequence
  Description of Artificial Sequence: Synthetic heavy chain variable region amino acid sequence
EVQLLESGGGLVKPGGSLRLSCAVSGFSFSNAWMSWVRQAPGKGLEWVGRIRSKTDGGTTDYAAPVKGRFTISRDDSKNTLYLQMNSLKTEDTAVYYCTTAPRYSTSWYPGYYYYYYMDVWGKGTTVTVSS

SEQ ID NO: 446 - protein, 106 aa, Artificial Sequence
  Description of Artificial Sequence: Synthetic light chain variable region amino acid sequence
DIQMTQSPSSLSASVGDRVTITCQASQDINFYLNWYQQKPGKAPKLLIYDASNLETGVPSRFSGSVSGTDFTFTISSLQPEDFATYYCQQYDDLPAFGGGTKVEIK

SEQ ID NO: 447 - protein, 125 aa, Artificial Sequence
  Description of Artificial Sequence: Synthetic heavy chain variable region amino acid sequence
EVQLVESGGGLVKPGESLRLSCAASGFTFSDYSMTWIRQAPGKGLLEWIAYINSQSNYMDYADSVKGRFTISRDNAKNSLYLQMNGLRADDTAVYFCARDRRTFVAATLGWFDPWGQGTLVTVSS

SEQ ID NO: 448 - protein, 107 aa, Artificial Sequence
  Description of Artificial Sequence: Synthetic light chain variable region amino acid sequence
ETTLTQSPATLSVSPGERATLSCRASQSVSNNVAWYQQKPGQAPRVLIYAASTRATGIPARFSGSESGTEFTLTISSLQSEDFAVYYCQQYNNWPRTFGQGTKLEIK

SEQ ID NO: 449 - protein, 123 aa, Artificial Sequence
  Description of Artificial Sequence: Synthetic heavy chain variable region amino acid sequence
QVQLQQWGAGLLRPSETLSLTCAVSGGSFSGHYWSWIRQPPGKGLEWIGGINHSGNTNYSPSLRSRVTMSVDTSRNQFSLMLRSVTAADTAVYFCARNVPNLYGDYPRWFDPWGQGTLVTVSS

SEQ ID NO: 450 - protein, 111 aa, Artificial Sequence
  Description of Artificial Sequence: Synthetic light chain variable region amino acid sequence
QSVLTQPASVSGSPGQSITISCTGTSSDVGGFNYVSWYQHHPGKAPKLMIYDVNNRPSGASNRFSGSKSGNTASLTISGLQAEDEADYYCSSYRSSDTLYVFGTGTKVTVL

SEQ ID NO: 451 - protein, 123 aa, Artificial Sequence
  Description of Artificial Sequence: Synthetic heavy chain variable region amino acid sequence
EVQLLESGGGLVKPAGSLRLSCAASGFSFSSYYMNWIRQAPGKGLEWVSDISGGSSYTNYADSVKGRFTVSRDNAKNSVYLQMNSLRGEDTAVYYCARGASTAATYTPTFDYWGQGILVTVSS

SEQ ID NO: 452 - protein, 110 aa, Artificial Sequence
  Description of Artificial Sequence: Synthetic light chain variable region amino acid sequence
QPVLTQPPSVSGAPGQRVTISCTGSSSNIGAGYDVHWYQQLPGTAPKLLMFGNNNRPSGVPDRFSGSKSGTSASLAITGLRPEDEADYYCQSYDRRLTVVFGGGTKLTVL

SEQ ID NO: 453 - protein, 122 aa, Artificial Sequence
  Description of Artificial Sequence: Synthetic heavy chain variable region amino acid sequence
EVQLVESGGGLVKPGGSLRLSCAASGFSFSSYQINWVRQAPGKGLEWVSSISGGSSYTDYADSIKGRFTISRDNAKKSAFLQMKSLRADDTAVYYCARALMATAGGLAFDIWGQGTMVTVSS

SEQ ID NO: 454 - protein, 110 aa, Artificial Sequence
  Description of Artificial Sequence: Synthetic light chain variable region amino acid sequence
QPVLTQPPSVSGAPGQRVTISCTGSGSNIGAGYDVHWYQQVPGTAPKLLILRNTNRPSGVPDRFSGSKSGTSASLAITGLQAEDEADYYCQSYDRSLSVVFGGGTKLTVL

SEQ ID NO: 455 - protein, 121 aa, Artificial Sequence
  Description of Artificial Sequence: Synthetic heavy chain variable region amino acid sequence
QVQLVESGTHVKKPGASVKVSCEASDDTFNNKGIVWVRQAPGQGLEWMGWIRPNNGNTKYAQKFQGRVTMTTDASTNTAYMELRSLRSGDTAVYYCAREQFKWNDFYFDYWGQGILVTVSS

SEQ ID NO: 456 - protein, 108 aa, Artificial Sequence
  Description of Artificial Sequence: Synthetic light chain variable region amino acid sequence
SYELMQPPSVSVAPGQTATITCGGSNIGSETVHWYQQKPGQAPVLVVHDDTDRPSGIPERFSGSNSGNTATLTISGVEAGDEADFYCQVRDSRTDDVVFGGGTKLTVL

SEQ ID NO: 457 - protein, 128 aa, Artificial Sequence
  Description of Artificial Sequence: Synthetic heavy chain variable region amino acid sequence
QVQLVESGGDLVQKGGSLRLSCAASGFTFDNYAMTWIRQAPGQGLEWVSTVSGFVLGTGYTTYYADSVKGRFTISRDSSKNTVYLQLNSLRAEDTAVYYCAKCAATRNECLWDYLQQWGQGTTVTVSS

SEQ ID NO: 458 - protein, 107 aa, Artificial Sequence
  Description of Artificial Sequence: Synthetic light chain variable region amino acid sequence
EIVMTQSPSSLSASVGDRVTITCRASQSVSIYLNWYQQKGGKAPKLLIYGASALQRGVPSRFSGSGSGTDFTLTITSLQPEDFATYFCHQSYSAPQTFGQGTKVDIK

SEQ ID NO: 459 - protein, 133 aa, Artificial Sequence
  Description of Artificial Sequence: Synthetic heavy chain variable region amino acid sequence
EVQLVESGGGLVQPGGSLRLSCAASGFTFTNYAMSWVRQAPGKGLEWVSGISGSGGSTYYADSVKGRFTISRDNSKNTLYLQMNSLRAEDTAVYYCAKDQGYAVVVADATRNLPPRRYGMDVWGQGTTVTVSS

SEQ ID NO: 460 - protein, 109 aa, Artificial Sequence
  Description of Artificial Sequence: Synthetic light chain variable region amino acid sequence
EIVLTQSPGTLSLSPGERATLSCRASHSVSSSYLAWYQQKPGQAPRLLIYGASSRATGIPDRFSGSGSGTDFTLTISRLEPEDFAVYYCQQYGSSPPLTFGGGTKVDIK

SEQ ID NO: 461 - protein, 121 aa, Artificial Sequence
  Description of Artificial Sequence: Synthetic heavy chain variable region amino acid sequence
EVQLVESGAEVKKPGASVKVSCKASGYTFGNYGISWVRQAPGQGLEWMGWISAYNGNSNYAQKFQGRVTMTTDTSASTAYMEVRSLRSDDTAVYYCARDVPVTAARLLDYWGQGTLVTVSS

SEQ ID NO: 462 - protein, 113 aa, Artificial Sequence
  Description of Artificial Sequence: Synthetic light chain variable region amino acid sequence
DIVLTQTPLSLPVTLGQPASISCRSSQSLVYSDGNTYLSWFQQRPGQSPRRLIYKVSNRDSGVPDRFSGSGSGTDFTLKISRVEAEDVGVYYCMQATDWLGYTFGQGTKLEIK

SEQ ID NO: 463 - protein, 119 aa, Artificial Sequence
  Description of Artificial Sequence: Synthetic heavy chain variable region amino acid sequence
EVQLQESGPGLVKPSETLSLTCTVSGGSLRSYYWSWIRQPPGKGLEWIGNIYYGGSTNYNSSLKGRVTISIDTSKNQFSLRLSSVTAADTAVYYCARDGLFPMGEWDYWGQGILVTVSS

SEQ ID NO: 464 - protein, 110 aa, Artificial Sequence
  Description of Artificial Sequence: Synthetic light chain variable region amino acid sequence
QSALTQPASVSGSPGQSITISCTGTSNDVGDYNYVSWYQQHPGEAPKLMIYEVTNRPSGVSDRFSGSKSGNTASLTISGLQAEDEADYYCSSYTSSTSVVFGGGTQLTVL

SEQ ID NO: 465 - protein, 118 aa, Artificial Sequence
  Description of Artificial Sequence: Synthetic heavy chain variable region amino acid sequence
QVQLQESGPGLVKPSQTLSLTCSVSGGSVSSGDYYWTWIRQPAGKGLEWIGRIYNSGGTDYSPSLKSRVTISVDTSKNQFSLKLSSVTAADTAVYYCARGRGYYESPWGQGTLVTVSS

SEQ ID NO: 466 - protein, 106 aa, Artificial Sequence
  Description of Artificial Sequence: Synthetic light chain variable region amino acid sequence
EIVLTQSPATLSLSPGERATLSCRASQSVGIYIGWYQQKPGQAPRLLMYDASNRATGIPDRFSGSGSGTDFSLTISSLEPEDFAVYYCQLRSKWLTFGPGTKVEIK

SEQ ID NO: 467 - protein, 120 aa, Artificial Sequence
  Description of Artificial Sequence: Synthetic heavy chain variable region amino acid sequence
QVQLQESGPRLVKPSETLSLTCTVSGDSISSRNYFWAWIRQPPGKGLEWIGTIYYSGNTYSNPSLKSRVTISVDTSKKQFSLNLSSVTAADTAVYYCARGAYGGDAFDIWGQGTVVTVSS

SEQ ID NO: 468 - protein, 107 aa, Artificial Sequence
  Description of Artificial Sequence: Synthetic light chain variable region amino acid sequence
DIRVTQSPSSVSASVGDRVTITCRASQGIGTWLAWYQQKPGKAPHLLIYAASRLQSGVPSRFSGSGSGTDFTLSISSLHPEDFATYYCQQAYAFPRTFGQGTKVEIK

SEQ ID NO: 469 - protein, 125 aa, Artificial Sequence
  Description of Artificial Sequence: Synthetic heavy chain variable region amino acid sequence
EVQLVESGPGLVKPSQTLSLTCSVSGVSISRGSYYWSWIRQPAGGGLEWIGRIYTSGVTRYNPSLESRVTISLDSSQNQFFLRLSSVTAADTAVYYCATRESASYSSGPDAFDIWGQGTTVTVSS

SEQ ID NO: 470 - protein, 107 aa, Artificial Sequence
  Description of Artificial Sequence: Synthetic light chain variable region amino acid sequence
DIQMTQSPSTLSASVGDRVIITCRASQSVNSWLAWYQQKPGKAPKLLIYQASSLESGVPSRFSGSGSGTEFTLTINSLQPDDFATYYCQQYKTFSRPFGQGTKVEIK

SEQ ID NO: 471 - protein, 132 aa, Artificial Sequence
  Description of Artificial Sequence: Synthetic heavy chain variable region amino acid sequence
EVQLVESGGALVQPGGSLRLSCSASGFTFSSYAMHWVRQAPGKGLEYVSAINNFGDKTYYTDSVEGRFTISRDNSKKTLYLQMSSLRPEDTAVYYCVKDRGYCSSPSCYAVPYYYFYGMDVWGQGTTVTVSS

SEQ ID NO: 472 - protein, 107 aa, Artificial Sequence
  Description of Artificial Sequence: Synthetic light chain variable region amino acid sequence
EIVMTQSPSSLSASVGDRVTITCQASQGISNYLHWYQQKPGKAPKLLIYDASNLEAGVPSRFSGSGAGTDFTFTISSLQPEDVATYYCQHYNNLPFTFGPGTKVDIK

SEQ ID NO: 473 - protein, 118 aa, Artificial Sequence
  Description of Artificial Sequence: Synthetic heavy chain variable region amino acid sequence
EVQLLETGAEVKKPGASVKVSCHVSGYGLTDLSMHWVRQAPGKRLQWMGSFDPQYGETIDTQNFQGRVTMTVDTSTATLYMQLSGLRSEDTAMYYCATPQSTGALDNWGQGTLVTVSS

SEQ ID NO: 474 - protein, 115 aa, Artificial Sequence
  Description of Artificial Sequence: Synthetic light chain variable region amino acid sequence
DIRVTQSPSSLSASVGDRVTITCRASQSISSYLSWYQQKPGKAPRLVIFAASNLQSGVPSRFSGTGSSRFSDSGSWTDFTLTISSLQPEDFAIYYCQQTYITPFTFGQGTKVDIK

SEQ ID NO: 475 - protein, 128 aa, Artificial Sequence
  Description of Artificial Sequence: Synthetic heavy chain variable region amino acid sequence
EVQLVESGGGLVQPGGSLRLSCVASGFTFSNYWMNWVRQAPGKGLEWVANIKEDGSEIKYVDSVKGRFTISRDNAKNSLYLQMNSLRAEDTAVYYCARTEDSSSWFVAIDYYNYMDVWGKGTTVTVSS

SEQ ID NO: 476 - protein, 109 aa, Artificial Sequence
  Description of Artificial Sequence: Synthetic light chain variable region amino acid sequence
DIQVTQSPGTLSLSPGERATLSCRASQTVSSSYLAWYQQKPGQAPRLLFYGASSRATDIPDRFSASGSGTDFTLTIHRLEPEDFAVYYCQLYGRSPPYTFGQGTKVEIK

SEQ ID NO: 477 - protein, 121 aa, Artificial Sequence
  Description of Artificial Sequence: Synthetic heavy chain variable region amino acid sequence
QVQLVQSGGGVVHPGRSLRLSCAASGFSFSDYGMHWVRQAPGKGLEWVAVIWYDGINKYYADSVKGRFAISRDNSKNTLYLQMNSLRAGDTAVYYCARGGIAAAQRYFDYWGQGTLVTVSS

SEQ ID NO: 478 - protein, 105 aa, Artificial Sequence
  Description of Artificial Sequence: Synthetic light chain variable region amino acid sequence
ETTLTQSPGTLSLSPGERATLSCRASQTVSSSNLAWYQQKPGQAPRLLIYGASSRATGIPDRFSGSGSGTDFTLTISRLEPEDFAVYYCQQSGTSFGQGTKVDIK

SEQ ID NO: 479 - protein, 121 aa, Artificial Sequence
  Description of Artificial Sequence: Synthetic heavy chain variable region amino acid sequence
EVQLVESGGEVKKPGASVKVSCKTSGYPFSNYGISWMRLAPGQGLEWMGWISSYNGNTYYTKKFQGRVSMTTDTSTSTAYMELRSLRSDDTAVYYCARDVPVIAAHTFEYWGQGTLVTVSS

SEQ ID NO: 480 - protein, 113 aa, Artificial Sequence
  Description of Artificial Sequence: Synthetic light chain variable region amino acid sequence
ETTLTQSPLSLPVTLGQPASISCRSSESLVYSDGNTYLSWFQQRPGQSPRRIIYKVSNRDSGVPDRFSGSGSGTDFTLKISRVEAEDVGVYYCMQATHWPRDTFGQGTKVDIK

SEQ ID NO: 481 - protein, 126 aa, Artificial Sequence
  Description of Artificial Sequence: Synthetic heavy chain variable region amino acid sequence
EVQLLESGPGLVKPSGTLSLTCAVSGGSIINSNWWSWVRQSPGKGLEWIGDIYHSGSTTYNPSLKSRVTISVDRSKNQYSLRLTSVTAADTAVYYCAKIGPDNRSGPDYYYFMDVWGKGTTVTVSS

SEQ ID NO: 482 - protein, 107 aa, Artificial Sequence
  Description of Artificial Sequence: Synthetic light chain variable region amino acid sequence
EIVLTQSPSSLPASVGDRVTISCRASQSISNYVYWYQQKPGKAPKLLIYAASSLQSGVPSRFSGSGSGTDFTLSISSLQFEDFATYFCQQSYSTPPTFGQGTKLEIK

SEQ ID NO: 483 - protein, 118 aa, Artificial Sequence
  Description of Artificial Sequence: Synthetic heavy chain variable region amino acid sequence
EVQLVESGGGVVQPGRSLRLSCSASGFPFHSYAMHWVRQAPGKGLEWVAGIWYEGSSESYADSVKGRLTISRDNSRNTLYLQMNSLRVEDTAVYYCARRGSFSGFDSWGQGSLVTVSS

SEQ ID NO: 484 - protein, 112 aa, Artificial Sequence
  Description of Artificial Sequence: Synthetic light chain variable region amino acid sequence
DIVMTQSPLSLPVTPGEPASISCRSSQSLLHSNGYNYLDWYLQKPGQSPQLLISLGSNRASGVPDRFSGSVAGTDFTLKISRVEAEDVGVYYCMQSSQTPYTFGQGTKVDIK

SEQ ID NO: 485 - protein, 122 aa, Artificial Sequence
  Description of Artificial Sequence: Synthetic heavy chain variable region amino acid sequence
EVQLVESGGNLVKPGGSLRLSCAASGFTFSGYYMSWIRQAPGKGLEWISDISGGSSYTNYADSVKGRFTISRDNAKNSLYLQMNSLRAEDTAMYYCARVEYDTTGPFHFDYWGQGTLVTVSS

SEQ ID NO: 486 - protein, 111 aa, Artificial Sequence
  Description of Artificial Sequence: Synthetic light chain variable region amino acid sequence
QPVLTQPPSVSGAPGQRVTISCTGSSSNIGAGYDVHWYQQLPGTAPKLLIYGNNNRPSGVPDRLSGSKSGTSASLAITGLQAEDEADYYCQSYDSSLSGYVFGTGTKVTVL

SEQ ID NO: 487 - protein, 129 aa, Artificial Sequence
  Description of Artificial Sequence: Synthetic heavy chain variable region amino acid sequence
EVQLVESGGGLVQPGGSLRLSCVVSGFTFKSYWMTWVRQAPGKGLEWVANIKEDGSEKYYVDSVKGRFTISRDNARNSLFLQMNSLRADDTAVYYCARNLEVSNEFYVVTDNYYLMDVWGQGTTVTVSS

SEQ ID NO: 488 - protein, 107 aa, Artificial Sequence
  Description of Artificial Sequence: Synthetic light chain variable region amino acid sequence
DIQLTQSPSSLSASVGDRVTITCRASQSISFFLNWYRQKPGKAPKLLIYAASTLQSGVPSRFSGSGSGTDFTLTISSLQPEDFASYYCQQSYSTPHTFGQGTKVEIK

SEQ ID NO: 489 - protein, 118 aa, Artificial Sequence
  Description of Artificial Sequence: Synthetic heavy chain variable region amino acid sequence
EVQLVESGGGVVQPGRSLRLTCAASGFPFSSYAMHWVRQAPGKGLEWVAVTWYDGPNRDYADSVKGRFTVSRDNSKNTLYLQMTSLRADDTAVYYCARRGSWGSFDYWGQGTLVTVSS

SEQ ID NO: 490 - protein, 112 aa, Artificial Sequence
  Description of Artificial Sequence: Synthetic light chain variable region amino acid sequence
DIVMTQSPLSLSATPGEPASISCRPSQSLLHSNGYNYLEWYLQKPGQSPQLLIYLGSNRASGVPDRFSGGGSGTDFTLRISRVEADDVGVYYCMQASQTPYTFGQGTKVEIK

SEQ ID NO: 491 - protein, 121 aa, Artificial Sequence
  Description of Artificial Sequence: Synthetic heavy chain variable region amino acid sequence
QVQLVQSGAEVKKPGASVKVSCKASGYTFSSNVIGWVRQAPGQGLEWMGWISTNNGNTKYGQKFQGRVTMTTDPSTSTAYMELRSLRSDDTAFYYCARESLGMGGFYFDYWGQGTLVTVSS

SEQ ID NO: 492 - protein, 108 aa, Artificial Sequence
  Description of Artificial Sequence: Synthetic light chain variable region amino acid sequence
QPVLTQPPSVSVAPGQTARITCGGDNIGSKSVHWYQQKPGQAPVLVVYDDSDRPSGIPERFSGSNSGNTASLTISRVEAGDEADYCCQVWDSGSDLWVFGGGTKLTVL

SEQ ID NO: 493 - protein, 126 aa, Artificial Sequence
  Description of Artificial Sequence: Synthetic heavy chain variable region amino acid sequence
QVQLVESGPALVKPTQTLTLTCTFSGFSLTTRGMCVSWIRQPPGKALEWLARIDWDDDKYYSTSLKTRLTISKDTSKNQVVLTMTNMDPVDTATYYCARASTLTTAGYYLHYKDVWGNGTTVTVSS

SEQ ID NO: 494 - protein, 106 aa, Artificial Sequence
  Description of Artificial Sequence: Synthetic light chain variable region amino acid sequence
DIRMTQSPSSLSASVGDRVTITCRASQSIGTYLNWFQQKPGKAPNLLIYAASILHSGVPSRFSGSGSGTDFTLTIRTLQPEDFATYYCQQSYPTVTFGQGTKVEIK

SEQ ID NO: 495 - protein, 119 aa, Artificial Sequence
  Description of Artificial Sequence: Synthetic heavy chain variable region amino acid sequence
EVQLVESGGGVVQPGRSLRLSCAASGFPFNSYGMHWVRQAPGKGLEWLAVIYFDESTAYYADSVKGRFTISRDNSKSTLYLQMNSLRAADTAIYYCTTTVMIPYGGVFWGQGTLVTVSS

SEQ ID NO: 496 - protein, 108 aa, Artificial Sequence
  Description of Artificial Sequence: Synthetic light chain variable region amino acid sequence
EIVMTQSPGTLSLSPGDRATLSCRASQSVGSTHFAWYQQKPGQAPRLLIYAASIRATGIPDRFSGGGSGTDFTLTISRLAPEDFAVYYCQQYGSTPITFGQGTRLEIK

SEQ ID NO: 497 - protein, 123 aa, Artificial Sequence
  Description of Artificial Sequence: Synthetic heavy chain variable region amino acid sequence
QVQLVQSGGGVVQPGRSLRLSCAASGFTLSTYGMHWVRQAPGKGLEWVAVIYYDESNKFYADSVQGRFTISRDDSKNTLFLQMNSLRAEDTAVYYCARESRPRGYSYSDFDSWGQGTLVTVSS

SEQ ID NO: 498 - protein, 108 aa, Artificial Sequence
  Description of Artificial Sequence: Synthetic light chain variable region amino acid sequence
QPGLTQPRSVSGSPGQSVTISCTGTSSDVGTFNYVSWYQQHPGKAPKLMIYDVNQRPSGVPDRFSGSKSGNTASLTISGLQAEDEADYYCCAYAGYYSFGGGTKLTVL

SEQ ID NO: 499 - protein, 124 aa, Artificial Sequence
  Description of Artificial Sequence: Synthetic heavy chain variable region amino acid sequence
QVQLQESGPVLVKPSETLSLTCTVSGGSITSSAYYWGWIRQPPGKGLEWIGSVSYSGTTSYTPSLKSRVTISGDASKEQFSLNLRSVTAADTAVYYCARQTKAFGRRDYGMDVWGQGTTVTVSS

SEQ ID NO: 500 - protein, 111 aa, Artificial Sequence
  Description of Artificial Sequence: Synthetic light chain variable region amino acid sequence
QPVLTQPPSVSAAPGQKVTISCSGSNSNIGSNFVSWYQQLPGTAPKLLIYENNKRPSGIPDRFSGSKSGPSATLGITGLQTEDEADYYCGTWDTGLSAHWVFGGGTKLTVL

SEQ ID NO: 501 - protein, 126 aa, Artificial Sequence
  Description of Artificial Sequence: Synthetic heavy chain variable region amino acid sequence
EVQLVESGPVLVKPRGTLTLTCTVSGFSLSDARMGVSWIRQPPGKALEWLAHIFWDDEKSYSTSLKNRLTISKDTSRGQVVLRMTNMDPVDTGTYFCARVNTYHSGGYYLYYFDVWGQGTLVTVSS

SEQ ID NO: 502 - protein, 108 aa, Artificial Sequence
  Description of Artificial Sequence: Synthetic light chain variable region amino acid sequence
EIVLTQSPSSLSASVGDRVTITCRASQIIASYLNWYQQKPGQAPKLLIYAASSLQSGVPSRFSGSGSGTDFTLTISSLQPEDFATYYCQQSYSTRMYTFGQGTKVEIK

SEQ ID NO: 503 - protein, 127 aa, Artificial Sequence
  Description of Artificial Sequence: Synthetic heavy chain variable region amino acid sequence
EVQLVESGPGLVKPSETLSLTCTVSGGSISDIDYYWGWIRQPPGKGLEWIGSIYYSGSTYYNPSLESRVTISVDTSKNQFSLKLRSVSAADTALYHCARHGPPWVVTAIRGHAFDVWGQGTTVTVSS

SEQ ID NO: 504 - protein, 115 aa, Artificial Sequence
  Description of Artificial Sequence: Synthetic light chain variable region amino acid sequence
DIRVTQSPDSLAVSLGERATINCKSSQSILYSSNNKNYLAWYQQKPGQPPKLLIYWASTRESGVPDRFSGSGSGTDFTLTISSLQAEDVAVYYCQEYYSYPPMYTFGQGTKVDIK

SEQ ID NO: 505 - protein, 125 aa, Artificial Sequence
  Description of Artificial Sequence: Synthetic heavy chain variable region amino acid sequence
QVQLVESGPGLVKPSGTLSLTCAVSGDSINSGNWWNWVRQAPGKGLEWIGEIYHRGTSNYNPSLKSRVTISVDQSKNQFSLKVTSLTAADTAIYYCARARGYSSGPSYYYYLDVWGKGTLVTVSS

SEQ ID NO: 506 - protein, 106 aa, Artificial Sequence
  Description of Artificial Sequence: Synthetic light chain variable region amino acid sequence
EIVMTQSPSSLSASVGDRVTISCRASQSISTYLNWYQQKPGKAPKVIIYGASNLQSGVPSRFSGSGSGTDFTLTISSLQPEDFATYYCQKSFNPCVFGQGTKVDIK

SEQ ID NO: 507 - protein, 122 aa, Artificial Sequence
  Description of Artificial Sequence: Synthetic heavy chain variable region amino acid sequence
QVQLQQWGAGLLKPSETLSLSCAVSGGSFSGYYWTWIRQPPGKGLEWIGEINHSGSTNYNPSLKSRVTISVDTSKNQFSLKLSSVTAADTAVYYCARARYFDYLAHWSFDLWGRGTLVTVSS

SEQ ID NO: 508 - protein, 112 aa, Artificial Sequence
  Description of Artificial Sequence: Synthetic light chain variable region amino acid sequence
GIQMTQSPLSLPVTPGEPASISCRSSQSLLHSNGYKYLDWYLQKPGQSPQLLIYLGSDRASGVPDRFSGSGSGTDFTLKISRVEAEDVGVYYCMQALQTPWTFGQGTKLEIK

SEQ ID NO: 509 - protein, 120 aa, Artificial Sequence
  Description of Artificial Sequence: Synthetic heavy chain variable region amino acid sequence
QVQLQESGGGVVQPGRSLTLSCAASGFTFSSYGMHWVRQAPGKGLDWVAEIWYDGSNKYYVDSVKGRFTISRDNSKNTLYLQMKSLRAEDTAIYYCARDGGYESPFFDKWGQGTLVTVSS

SEQ ID NO: 510 - protein, 112 aa, Artificial Sequence
  Description of Artificial Sequence: Synthetic light chain variable region amino acid sequence
EIVMTQSPDSLGVSLGERATINCKSSQSLYTSNHENSLAWYQQKPGQPPRLLIYWASTRELGVPDRFSGSGSGTDFTLTISSLQAEDVAVYYCQQYHTTPLTFGPGTKVEIK

SEQ ID NO: 511 - protein, 122 aa, Artificial Sequence
  Description of Artificial Sequence: Synthetic heavy chain variable region amino acid sequence
EVQLVESGGAVVQPGGSLRLSCVASGLAFDEYTMHWVRQSSAKGLEWISLISWNGGITYYADSVKGRFTISRDNSKNSLYLQMNSLRTEDTATYFCARLGYGSGSDYGDDYWGQGTLVTVSS

SEQ ID NO: 512 - protein, 108 aa, Artificial Sequence
  Description of Artificial Sequence: Synthetic light chain variable region amino acid sequence
ETTLTQSPGTLSLSPGERATLSCRASQSVSNNYLAWYQQKPGQAPRLLIHGASTRVTGIPARFSGSGSGTDFTLTISRLEPEDFAVYYCHQYHSSPRTFGQGTKVDIK

SEQ ID NO: 513 - protein, 120 aa, Artificial Sequence
  Description of Artificial Sequence: Synthetic heavy chain variable region amino acid sequence
QVTLKESGPTLVKPTQTLTLTCTFSGFSLSISGVGVGWIRQPPGKALEWLAVMYWDDDKRYSPSLKTRLTITKDTSKNQVVLTMTNMAPVDTAIYYCAHLWFGEAAFDPWGQGTLVTVSS

SEQ ID NO: 514 - protein, 112 aa, Artificial Sequence
  Description of Artificial Sequence: Synthetic light chain variable region amino acid sequence
EIVLTQSPLSLPVTLRQTASISCRSGQSLLYSDGNTYLNWFQQRPGQSPRRLISIVSKRDSGVPDRFSGSGSGTDFTLKISRVEAEDVGVYYCMQGTHWPYTFGQGTKVEIK

SEQ ID NO: 515 - protein, 117 aa, Artificial Sequence
  Description of Artificial Sequence: Synthetic heavy chain variable region amino acid sequence
QVQLVQSGADVKKPGASVKVSCKSSGYTFSNHSMHWVRQAPGQGLEWMGRIHPSSGTTTYAQKFQGRVTMTRDTSTSTVYMEVSSLRSEDTAVYYCARSPFFDFDFWGQGTMVTVSS

SEQ ID NO: 516 - protein, 110 aa, Artificial Sequence
  Description of Artificial Sequence: Synthetic light chain variable region amino acid sequence
SYVLTQPHSVSESPGKTVTISCTRSSGSIASNYVQWYQQRPGSAPTSVIYEDNQRPSGVPDRFSGSIDSTSNSASLTISGLKTEDEADYYCQSYYSSGWVFGGGTKLTVL

SEQ ID NO: 517 - protein, 128 aa, Artificial Sequence
  Description of Artificial Sequence: Synthetic heavy chain variable region amino acid sequence
QVQLQESGAGLLKPSETLSLTCTVYGGTFSGYHWNWIRQPPGKGLEWIGEINHRENTDYNASLESRVTISVDTSKRQFSLKMNSVTVADTAVYYCARGIQVLTNLGTEVRVHQFLDLWGRGTLVTVSS

SEQ ID NO: 518 - protein, 108 aa, Artificial Sequence
  Description of Artificial Sequence: Synthetic light chain variable region amino acid sequence
DIVLTQTPATLSLSPGERATLSCRASQSVSTYLAWYQQKPGQAPRLLIYDASNRAAGIPARFSGSGSGTDFTLTISSLEPEDFAVYYCQQRTNWLPLTFGGGTKVDIK

SEQ ID NO: 519 - protein, 127 aa, Artificial Sequence
  Description of Artificial Sequence: Synthetic heavy chain variable region amino acid sequence
QVQLVQSGAEMKTPGASVKVSCKASGYSFSNYGFTWVRQAPGQGLEWMGWISGYSAKTNYAQDLQGRVTMTIDTSTSTSYMELRSLRSDDTAVYYCARDPLGYFGSGTYRGGAFDFWGQGTTVTVSS

SEQ ID NO: 520 - protein, 109 aa, Artificial Sequence
  Description of Artificial Sequence: Synthetic light chain variable region amino acid sequence
QSALTQPASVSGSPGQSITLSCTGTNNDVGSYHLVSWYQQYPGKAPKLVIYEVTKRPSGVSNRFSGSKSGNTASLTISGLQPEDEADYYCCSYAGDRRIFGGGTKVTVL

SEQ ID NO: 521 - protein, 118 aa, Artificial Sequence
  Description of Artificial Sequence: Synthetic heavy chain variable region amino acid sequence
EVQLVESGGGVVQPGRSLRLSCAASGFSFSTYGMHWVRQAPGKGLEWVGVIWYDETTKYYADSVKGRFSISRDNSKNMVYVQMNSLRADDTALYYCAREVWGGVFDIWGQGTTVTVSS

SEQ ID NO: 522 - protein, 107 aa, Artificial Sequence
  Description of Artificial Sequence: Synthetic light chain variable region amino acid sequence
DIQMTQSPATLSASVGDRVTITCRASQNIVTWLAWYQQKPGKAPNLLIYKASSLESGVPSRFSGSGSGTEFTLTISSLQPDDFATYYCQHYNSYSGAFGQGTKVDIK

SEQ ID NO: 523 - protein, 124 aa, Artificial Sequence
  Description of Artificial Sequence: Synthetic heavy chain variable region amino acid sequence
QVQLQESGPGLVKPSETLSLSCTASGDSISDYYWSWIRQPPGKGLEWIGFVSDTWGTNYSPSLTSRVAISLDTSRSQVSLRLRSVTAADTAVYYCVRTHLYDRGGYYLYYFDYWGQGTLVTVSS

SEQ ID NO: 524 - protein, 107 aa, Artificial Sequence
  Description of Artificial Sequence: Synthetic light chain variable region amino acid sequence
DIRMTQSPPSLSASVGDRVTITCRASQRIASYLNWYQQKPDTAPKLLIYAASNLQTGVPSRFSGSGSGTDFTLTISSLQPEDFATYYCQQSYSTPYTFGQGTKLEIK

SEQ ID NO: 525 - protein, 126 aa, Artificial Sequence
  Description of Artificial Sequence: Synthetic heavy chain variable region amino acid sequence
QVQLVQSGPAVVKPTQTLTLTCSFSGFSLSTSRMSVSWIRQPPGKALEWLARIDWDGDKYYSTSLKSRLTISKDTSKNQVVLTMTNMDPVDTATYYCARGSYYVSSGYYLNYFDYWGQGTLVTVSS

SEQ ID NO: 526 - protein, 107 aa, Artificial Sequence
  Description of Artificial Sequence: Synthetic light chain variable region amino acid sequence
DIRMTQSPSSLSASVGDRVTITCRTSQTIASYLNWYQQKPGKAPNLLIYAASILQTGVPSRFSGSGSGTDFTLTISSLQPEDFATYYCQQSYGTPQTFGQGTKVEIK

SEQ ID NO: 527 - protein, 125 aa, Artificial Sequence
  Description of Artificial Sequence: Synthetic heavy chain variable region amino acid sequence
QVQLQESGPGVVKPSETLSLTCTVSGGSISNTHSYWGWIRQSPGKGLEWIGSIYYTGSTYYNPSFRSRVTLSVDTSKNQFSLKLSSVTAADTAVYYCAAPDYFVLTDYKSTFDYWGRGALVTVSS

SEQ ID NO: 528 - protein, 108 aa, Artificial Sequence
  Description of Artificial Sequence: Synthetic light chain variable region amino acid sequence
DIVMTQSPGTLSLSPGGRATLSCRASQSVGSSSLAWYQQKPGQAPRLLIYGASSRAAGIPDRFSGSGSGTDFTLTINRLEPEDFAMYYCQQYGSSPLTFGGGTKVEIK

SEQ ID NO: 529 - protein, 119 aa, Artificial Sequence
  Description of Artificial Sequence: Synthetic heavy chain variable region amino acid sequence
QVQLQESGPGLVKPSETLSLICTVSGGSISNYYWSWIRQPPGKGLEWIGYVWFGTTKYNPSLKNRVTISVDTGKNQVSLKVNSVTAADTAIYYCARDSSIWYRGAFEIWGQGTTVTVSS

SEQ ID NO: 530 - protein, 107 aa, Artificial Sequence
  Description of Artificial Sequence: Synthetic light chain variable region amino acid sequence
DIRLTQSPSSLSASVGDRVTITCQASQDISNHLNWYQQRPGKAPELLIYDASTLETGGPSRFSGSGSGTDFTLTISSLQPEDFADYYCQQYDNLPVTFGGGTKVDIK

SEQ ID NO: 531 - protein, 118 aa, Artificial Sequence
  Description of Artificial Sequence: Synthetic heavy chain variable region amino acid sequence
QVQLVQSGAEVKKPGASVRVSCKVPGNTLSDLSMHWVRHTPGEGLEWMGSFDPEYGETIPAQRFQGRVTMTEDTSTDTAYMELTSLRFEDTAVYYCAAPHASGALQHWGQGTLVTVSS

SEQ ID NO: 532 - protein, 107 aa, Artificial Sequence
  Description of Artificial Sequence: Synthetic light chain variable region amino acid sequence
DIVMTQSPSSLSASVGDRVTITCRASQIISAYLNWYQQKAGKAPKLLIYAASSLQSGVPSRFSGSGSGTDFTLTISSLQPEDFATYYCQQTYITPFTFGQGTKLEIK

SEQ ID NO: 533 - protein, 121 aa, Artificial Sequence
  Description of Artificial Sequence: Synthetic heavy chain variable region amino acid sequence
QVQLVESGTEVKKPGASVKVSCKASGYTFTNYGITWVRQAPGQGLEWMGCISGYNGNTNYAQNLQGRVTMTTDTSTNTAYMELRSLISDDTAVYYCARDTGLTAAALLDYWGQGTLVTVSS

SEQ ID NO: 534 - protein, 112 aa, Artificial Sequence
  Description of Artificial Sequence: Synthetic light chain variable region amino acid sequence
DIVLTQSPLSLPVTLGQPASISCRSSQSLVYSDGNTYLSWFQQRPGQSPRRLIYKVSNRDSGVPDRFGGSGSGTYFTLKISRVEAEDVGIYYCMQAIHWPLTFGGGTKVEIK

SEQ ID NO: 535 - protein, 126 aa, Artificial Sequence
  Description of Artificial Sequence: Synthetic heavy chain variable region amino acid sequence
EVQLLESGGGLVKPGGSLRLSCAGSGFTLSSYGMNWVRQAPGQGLEWISSISSSSSYINYADSVKGRFTISRDNAQNSLYLQLNSLRAEDTAVYYCARGGLGYDYGLGSYTYADYWGQGTLVTVSS

SEQ ID NO: 536 - protein, 111 aa, Artificial Sequence
  Description of Artificial Sequence: Synthetic light chain variable region amino acid sequence
QSVVTQPPSVSGAPGQRVTISCTGSSSNTGAGYDIHWYQQLPGTGPKLLIYGNKNRPSGVPDRFSGSKSGTSASLAITGLQAEDEADYYCQSYDSSLSGWVFGGGTKVTVL

SEQ ID NO: 537 - protein, 123 aa, Artificial Sequence
  Description of Artificial Sequence: Synthetic heavy chain variable region amino acid sequence
EVQLLESGGGLVRPGGSLRLSCAVSGFTFSGNALTWIRRAPGKGLEWVSTIGDSGGGSYYADSVKGRFTISRDNSKSTLYLQMNSLTAEDTAVYYCARDPYGDYRDYYGIDVWGQGTTVTVSS

SEQ ID NO: 538 - protein, 112 aa, Artificial Sequence
  Description of Artificial Sequence: Synthetic light chain variable region amino acid sequence
EIVMTQSPLSLPVTPGEPASISCRSSQSLRHSNGYNYVDWYLQKPGQSPQLLIYLGSNRASGVPDRFRGSGSGTDFTLKISRVEAEDVGVYYCMQALQTPLTFGQGTKVEIK

SEQ ID NO: 539 - protein, 128 aa, Artificial Sequence
  Description of Artificial Sequence: Synthetic heavy chain variable region amino acid sequence
QVQLQQWGAGLLKPSETLSLTCAVHGGSFSGFYWSWIRQSPGKGLEWIAEINDSGNTNHNPSLKSRVTISIDTSKNQFSLNVSSVTAADTAVYYCAKNGGGHHYVGTLRFRSRAFDIWGQGTMVTVSS

SEQ ID NO: 540 - protein, 106 aa, Artificial Sequence
  Description of Artificial Sequence: Synthetic light chain variable region amino acid sequence
EIVMTQSPSTLSASVGDRVTITCRASQSIGNRLAWYQQKPGKAPKLLISLASGLETGVPSRFSGSGSGTEFTLTITSLQPDDFATYYCQQYSSYGTFGQGTKLEIK

SEQ ID NO: 541 - protein, 125 aa, Artificial Sequence
  Description of Artificial Sequence: Synthetic heavy chain variable region amino acid sequence
EVQLVETGPGLVKPSETLSLTCSVSGGSISSYYWSWLRQPPGKGLEWIGYIYNSGRTNYNPSLRSRVTISVDTSQNQFSLRLGSVTAADTAVYYCARGGAGDDLLRGSYRYLNFWGQGTLVTVSS

SEQ ID NO: 542 - protein, 110 aa, Artificial Sequence
  Description of Artificial Sequence: Synthetic light chain variable region amino acid sequence
QSVLTQPPSVSVAPGQTARITCGGNNIGSKSVHWYQQKPGQAPVLVVYDDTERPSGIPERISGSNSGNTATLTISRVEAGDEADYYCQVWDSSSDHPDLLFGGGTKLTVL

SEQ ID NO: 543 - protein, 123 aa, Artificial Sequence
  Description of Artificial Sequence: Synthetic heavy chain variable region amino acid sequence
EVQLVESGGGLVKPGGSLRLSCAASGFRFSSYGMHWVRQAPGRGLEWVSSITAGSSYMDYADSVKGRFSISRDNAKTSLYLQMNSLRAEDTAIYYCARENYDTGRGLNWFDPWGQGTLVTVSS

SEQ ID NO: 544 - protein, 110 aa, Artificial Sequence
  Description of Artificial Sequence: Synthetic light chain variable region amino acid sequence
QSVVTQPPSVSGAPGQRVTISCTGSSSNIGAGYDVHWYRQLPGTAPEVLIYGNNNRPSGVPDRFSGSKTGTSASLAITGLLAEDGADYYCQSYDRSQLWVFGGGTQLTVP

SEQ ID NO: 545 - protein, 119 aa, Artificial Sequence
  Description of Artificial Sequence: Synthetic heavy chain variable region amino acid sequence
EVQLVESGGGLVRPGGSLRLSCEASGLKLSGYSMNWVRQAPGKGLEWVSSISASSSYIHYADSLKGRFTISRDNAKNSLYLQMNSLRAEDTAVYYCVASWLTPGWFDPWGQGTLVTVSS

SEQ ID NO: 546 - protein, 111 aa, Artificial Sequence
  Description of Artificial Sequence: Synthetic light chain variable region amino acid sequence
QPVLTQPPSVSGAPGQTVTISCTGSSSNIGAGYDVHWYQQLPGTAPKLLIYGNTNRPSGVPDRFSGSKSGTSASLAVTGLQAEDEGDYYCQSYDSSLSGSAFGGGTKLTVL

SEQ ID NO: 547 - protein, 122 aa, Artificial Sequence
  Description of Artificial Sequence: Synthetic heavy chain variable region amino acid sequence
QVQLVQSGPGLVKPSQTLSLTCTVSGVSISSGGFYWSWIRQHPGKGLEWIGHIYYSRSTYYNPSLKSRVTMSLNMSKNQFSLRLSSVTAADTAVYYCARERREWLHGELDYWGQGTTVTVSS

SEQ ID NO: 548 - protein, 113 aa, Artificial Sequence
  Description of Artificial Sequence: Synthetic light chain variable region amino acid sequence
DIQMTQSPDSLAVSLGEGATINCKSSQSVLDSSKNKNYLAWYQQRPGQPPKLLISWASTRESGVPDRFSGSGSGTDFTLTISSLQAEDVAVYSCQQYFSPPATFGQGTKLEIK

SEQ ID NO: 549 - protein, 120 aa, Artificial Sequence
  Description of Artificial Sequence: Synthetic heavy chain variable region amino acid sequence
QVQLQESGPGLVKPSGTLSLTCVVSGGSIRSHNYWTWVRQPPGKGLEWIGEIYHSGNTNYNPSLKSRVTLSIDKSKNVFSLRLNSVTAADTAVYYCVGGGPFAPYYFENWGQGTLVTVSS

SEQ ID NO: 550 - protein, 111 aa, Artificial Sequence
  Description of Artificial Sequence: Synthetic light chain variable region amino acid sequence
QSVLTQPPSVSGAPGQRVTISCTGSSSNIGAGYAVHWYHQLPGTAPKLLIYDNNNRPSGVPDRFSGSKSGSSASLAITGLQAEDEADYYCQSYDRSLSGYVFGTGTKLTVL

SEQ ID NO: 551 - protein, 125 aa, Artificial Sequence
  Description of Artificial Sequence: Synthetic heavy chain variable region amino acid sequence
EVQLVESGGALVKPGGSLRLSCVASGFTFSDYYMHWVRQAPGKGLEWVSYISSTSSFTNYADSVKGRFIISRDNAKNSLYLQLNSLRAEDTAVYYCARDESSGWQTRRHFGMDVWGQGTLVTVSS

SEQ ID NO: 552 - protein, 104 aa, Artificial Sequence
  Description of Artificial Sequence: Synthetic light chain variable region amino acid sequence
EIVMTQSPSTLSASVGDRVTITCRASQSLNTWLAWYQHKPGKAPKLLISTASSLQSGVPSRFSASGSGTEFTLTISSLQPDDFATYYCQQFRGTFGPGTKVEIK

SEQ ID NO: 553 - protein, 123 aa, Artificial Sequence
  Description of Artificial Sequence: Synthetic heavy chain variable region amino acid sequence
QVQLVQSGAEVRKPGESLKISCKASGYSFTNYWIGWVRQMPGKGLEWMGIVYPADSHPVYSPSFQGQVTFSTDKSINTAYLQWSSLKASDTAMYFCARRDGGTDYLSDAFDIWGQGTMVTVSS

SEQ ID NO: 554 - protein, 107 aa, Artificial Sequence
  Description of Artificial Sequence: Synthetic light chain variable region amino acid sequence
DIVMTQSPSSLSASVGDRVTITCRTSQSIRRYLNWYQQKPGKAPKLLIYAASSLQSGVPSRFSGSGSGTDFTLTISSLQPEDFATYYCQQSYSTPNTFGQGTKVEIK

SEQ ID NO: 555 - protein, 123 aa, Artificial Sequence
  Description of Artificial Sequence: Synthetic heavy chain variable region amino acid sequence
EVQLVESGGGLVKPGGSLRLSCAASGFKFSTYYMSWIRQAPGKGLEWVSNISGGSSYSNHADSVKGRFTISRDNAKNSLYLEMNSLRAEDTAVYYCAREDLMGVSGLAYFEYWGQGILVTVSS

SEQ ID NO: 556 - protein, 110 aa, Artificial Sequence
  Description of Artificial Sequence: Synthetic light chain variable region amino acid sequence
QPVLTQPPSVSGAPGQRVTISCTGRSSNIGAGYDVNWYKQLPGAVPKVLIYGNTNRPSGVPDRFSGSKSGNSASLAITGLQAEDEADYYCQSYDRNLGYVFGTGTKLTVL

SEQ ID NO: 557 - protein, 123 aa, Artificial Sequence
  Description of Artificial Sequence: Synthetic heavy chain variable region amino acid sequence
EVQLVESGPGLVKPSQTLSLTCTVSGGSISNSNYFWSWIRQPAGKGLEWIGRVHSSGTTSYNPSLKSRITISVDASESQFSLNLTSVTAADTAIYYCARDSSDWGLGWYFDLWGRGTLVTVSS

SEQ ID NO: 558 - protein, 107 aa, Artificial Sequence
  Description of Artificial Sequence: Synthetic light chain variable region amino acid sequence
ETTLTQSPATLSLSPGERATLSCRASQSVTFYLAWYQHKPGQAPRLLIFDASKRATGIPARFSGSGSGTDFTLTISSLEPEDFALYYCQQRSDWPQTFGQGTKVDIK

SEQ ID NO: 559 - protein, 125 aa, Artificial Sequence
  Description of Artificial Sequence: Synthetic heavy chain variable region amino acid sequence
EVQLVESGGGLVKPGGSLRLSCAVSGFKFSSYTMNWVRQAPGKGLEWVSSVSASSSYIFYADSVQGRFIISRDNAQNSLYLQMNSLRADDTAVYYCTRDQYGPGHYYNPAWFDPWGQGTLVTVSS

SEQ ID NO: 560 - protein, 110 aa, Artificial Sequence
  Description of Artificial Sequence: Synthetic light chain variable region amino acid sequence
QPVLTQPPSASGAPGQRVTISCTGSSSNIGAGYDVHWYQQLPGTAPKVLIYGNTNRPSGIPDRFSGSKSGTSASLAIIGLQAEDEADYYCQSYDRNGSKVFGTGTKLTVL

SEQ ID NO: 561 - protein, 119 aa, Artificial Sequence
  Description of Artificial Sequence: Synthetic heavy chain variable region amino acid sequence
QVQLVQSGAEVRKPGDSLKISCKFSENIFTTYYWTGWVRQMPGRGLEWMGIIFPGDSDTRYSPSFQGHVTISVDKSIATAFLQWSSLKASDSAMYYCARAKYEGSFDMWGQGTMVTVSS

SEQ ID NO: 562 - protein, 108 aa, Artificial Sequence
  Description of Artificial Sequence: Synthetic light chain variable region amino acid sequence
DIQVTQSPSSLSASVGDRVSITCQASQDIRNRLNWYQQKPGKAPKLLIYDASILETGVPSRFSGSGSGTDFTFSISSLQPEDFATYYCQQYDSFSLFTFGPGTKVEIK

SEQ ID NO: 563 - protein, 116 aa, Artificial Sequence
  Description of Artificial Sequence: Synthetic heavy chain variable region amino acid sequence
QVQLQQSGAEVKKPGESLTISCKGSGYSFGNYWISWVRQMPGKGLEWMGRIDPSDSYVNYSPSFQGNVTMSVDKSSSTAYLQWSSLKASDTAMYYCARLAGYSTLWGQGTLVTVSS

SEQ ID NO: 564 - protein, 109 aa, Artificial Sequence
  Description of Artificial Sequence: Synthetic light chain variable region amino acid sequence
EIVLTQSPGTLSLSPGERATLSCRASQSFGSIYLAWYQQKPGQAPRLLIYGTSSRATGIPDRFSGSGSGTDFTLTIRRLEPEDFAVYYCLYYGSSPGATFGPGTKVDIK

SEQ ID NO: 565 - protein, 121 aa, Artificial Sequence
  Description of Artificial Sequence: Synthetic heavy chain variable region amino acid sequence
EVQLVESGHEVKKPGASVKVSCKASGYTFPSYGISWVRQAPGQGLEWMGWIVPYNGNTKYAQRFQGRITMTTDSPTSTASMELRGLRSDDTAVYYCARVFGDGYSYGYEYWGQGTLVTVSS

SEQ ID NO: 566 - protein, 107 aa, Artificial Sequence
  Description of Artificial Sequence: Synthetic light chain variable region amino acid sequence
DIVLTQSPSTLSASVGDRVTITCRASQSISIWLAWYQQKPGKAPKLLIYKTSELVSGVPSRFSGSGSGTEFTLTISGLQPDDFATYYCQQGNSYSHTFGQGTKVEIK

SEQ ID NO: 567 - protein, 122 aa, Artificial Sequence
  Description of Artificial Sequence: Synthetic heavy chain variable region amino acid sequence
QVQLVQSGAEVKEPGKSLKISCKGSGNHFGNYWIAWVRQMPGKGLEWMGIIYPGDSDTRYSPSFQDQVTISVDKSINTVYLQWSSLKAADTATYYCAGSKLGNSWYTIYDSWGQGTLVTVSS

SEQ ID NO: 568 - protein, 111 aa, Artificial Sequence
  Description of Artificial Sequence: Synthetic light chain variable region amino acid sequence
NFMLTQPASVSGSPGQSITISCAGPSALIGVYNLVSWYQQVPGKAPKLIIYEGSKRPSGVSHRFSGSKSGYTASLTISGLQTEDEADYYCCSYAGSGTSVVFGGGTKVTVL

SEQ ID NO: 569 - protein, 117 aa, Artificial Sequence
  Description of Artificial Sequence: Synthetic heavy chain variable region amino acid sequence
QVQLVQSGGGVVQPGRSLRLSCAASGFPFSSYAMHWVRQAPGKGLEWVAVIWYPGGEKYSADSVTGRFTISRDNSKNTLYLQMSSLRVEDTAVYYCARRSVGAFDYWGQGTLVTVSS

SEQ ID NO: 570 - protein, 112 aa, Artificial Sequence
  Description of Artificial Sequence: Synthetic light chain variable region amino acid sequence
DIQMTQSPLSLPVTPGEPASISCRSSQSLLNSNGYNYLDWYLQKPGQSPQVLIYLGSHRASGVPDRFSGSGSGTDFTLRISRVEAEDVGVYYCMQAVQTPYTFGQGTKVEIK

SEQ ID NO: 571 - protein, 131 aa, Artificial Sequence
  Description of Artificial Sequence: Synthetic heavy chain variable region amino acid sequence
QVQLVQSGAEVKKPGESLKISCQGFGFSFTSYWIGWVRQTPGKGLEWMGTIYPGDSETRKSPSIQGQVTFSADRSISTAYLQWSGLTASDTAVYYCARLKGGWGTTMAGIRDYFYYGLDVWGQGTTVTVSS

SEQ ID NO: 572 - protein, 110 aa, Artificial Sequence
  Description of Artificial Sequence: Synthetic light chain variable region amino acid sequence
EIVLTQSPGTLSLSPGERATLSCRASQSVSSSYLAWYQQKPGQAPRLLIYGASSRATGIPDRFTGSGSGTDFTLTISRLEPEDFAVYYCQQYATSLGGFTFGPGTKVDIK

SEQ ID NO: 573 - protein, 136 aa, Artificial Sequence
  Description of Artificial Sequence: Synthetic heavy chain variable region amino acid sequence
EVQLVQSGAEVKKPGASVKVSCKASGYTFISYYIHWVRQAPGQGLEWMGVINPSGGITDYAPKFQGRVSMTRDTSTRTVYLELSSLRSDDTAVYYCARDLCITTSCPRYYDYAWRSYRSEGYFDSWGQGTLVTVSS

SEQ ID NO: 574 - protein, 112 aa, Artificial Sequence
  Description of Artificial Sequence: Synthetic light chain variable region amino acid sequence
EIVMTQSPLSLPVTPGEPASISCRSSQSLLHSNGYNYLDWYLQKPGQSPQLLIYLGSNRASGVPDRFSGSGSGTDFTLKISRVEAEDVGVYYCMQAQQAPFTFGGGTKVEIK

SEQ ID NO: 575 - protein, 124 aa, Artificial Sequence
  Description of Artificial Sequence: Synthetic heavy chain variable region amino acid sequence
EVQLLESGPGLVKPSGTPSLTCAVSGVSITNSNNWWTWVRQPPGKGLEWIGEIYSSGSTNYSPSLKSRVTISLDKSKNQFSLKLSSVTAADTAVYYCARVLGYYGSGGGHLHSWGPGTLVTVSS

SEQ ID NO: 576 - protein, 112 aa, Artificial Sequence
  Description of Artificial Sequence: Synthetic light chain variable region amino acid sequence
SYELTQPPSASGTPGQRVTISCSGSSSNIGAGYDVHWYQQLPGTAPKLLISVNSNRPSGVPDRFSGSKSGTSASLAITGLQAEDEANYYCQSYDNSLSGYVVFGGGTKLTVL

SEQ ID NO: 577 - protein, 123 aa, Artificial Sequence
  Description of Artificial Sequence: Synthetic heavy chain variable region amino acid sequence
EVQLVESGGVVVQPGGSLRLSCAASGFTFDDYTMHWVRQAPGKGLEWVSLISWVGDTTYYADSVKGRFTISRDNSKNSLYLQMNSLRTEDTALYYCAKGGYYDGSGYYYFDYWGQGTLVTVSS

SEQ ID NO: 578 - protein, 107 aa, Artificial Sequence
  Description of Artificial Sequence: Synthetic light chain variable region amino acid sequence
DIRLTQSPSSLSASVGDRVTITCRASQSISNYLNWYQQKPGKAPKLLMYAASSLQSGVPSRFSGSGSGTDFTLTISSLQPEDFATYSCQQSYSTPYTFGQGTKVEIK

SEQ ID NO: 579 - protein, 127 aa, Artificial Sequence
  Description of Artificial Sequence: Synthetic heavy chain variable region amino acid sequence
EVQLVESGPRLVKPSQTLSLTCNVSGVPVNTGGYYWSWIRRHPIKGLEWIGYIYYSGSTHYNPSLRGRATMSVDTSKNQFSLRLSSVTAADTAVYYCAKDTITVLRGVAKKGVFDPWGQGILVTVSS

SEQ ID NO: 580 - protein, 106 aa, Artificial Sequence
  Description of Artificial Sequence: Synthetic light chain variable region amino acid sequence
DIQMTQSPSTLSASVGDRVIITCRASQSISSWLAWYQYKPGKAPNLLIYKATTLDSGVPSRFSGSGSGTEFTLTISSLQPDDFATYYCQQYDSYPTFGQGTKVEIK

SEQ ID NO: 581 - protein, 123 aa, Artificial Sequence
  Description of Artificial Sequence: Synthetic heavy chain variable region amino acid sequence
QVQLVQSGAEVKKPGASVKVSCKASGYTFTSYGITWVRQAPGQGLEWMGWISTYNGKTNYAQKFKGRVTMTTDTSTSTAYVELTSLRSDDTAVYYCAREFPTRIVDSFYMDVWGKGTTVTVSS

SEQ ID NO: 582 - protein, 109 aa, Artificial Sequence
  Description of Artificial Sequence: Synthetic light chain variable region amino acid sequence
SYELTQPPSVSVAPGQTARITCGGSNIGSETVHWYQQKPGQAPVLVVYGDSDRPSGIPERFSGSNSGNTATLTISRVEAGDEADYYCQVWDSRSDDFHVFGSGTKLTVL

SEQ ID NO: 583 - protein, 130 aa, Artificial Sequence
  Description of Artificial Sequence: Synthetic heavy chain variable region amino acid sequence
QVQLVQSGAELKKPGESLKISCKTSGYTFANYWIGWVRQMPGKGLEWMGIIYPGDSDTRYSPSFQGQVTFSADKSINSAYLQWHSLKASDSAIYYCARRFSPDYSDGAAPPTLSDAFDVWGQGTTVTVSS

SEQ ID NO: 584 - protein, 107 aa, Artificial Sequence
  Description of Artificial Sequence: Synthetic light chain variable region amino acid sequence
DIVMTQSPSSLSASVGDRVTITCRASQNINIYLNWYQQKPGKAPKLLIYAASTLQSGVPSRFSGSGSATDFTLTISSLQPEDFATYYCQQSYRTPNDFGRGTKVDIK

SEQ ID NO: 585 - protein, 123 aa, Artificial Sequence
  Description of Artificial Sequence: Synthetic heavy chain variable region amino acid sequence
EVQLVESGGGLVKPGGSLRLSCLASGFKFRSYSMNWVRQAPGTGLVWVASISASSSFIFYADSLKGRFTISRDNDKNSLYLQMNSLTVEDTAVYYCVRDMSGISSGGKTFDYWGQGTLVTVSS

SEQ ID NO: 586 - protein, 108 aa, Artificial Sequence
  Description of Artificial Sequence: Synthetic light chain variable region amino acid sequence
QSVLTQPPSVSGAPGQRVTISCTGSSSNLGAGYDVQWYQQLPGTAPKLLIYGNNNRPSGVPDRFSGSKSGTSASLAITGLRAEDEADYYCQSYDTSPVFGGGTKLTVL

SEQ ID NO: 587 - protein, 126 aa, Artificial Sequence
  Description of Artificial Sequence: Synthetic heavy chain variable region amino acid sequence
EVQLVESGAEAKKPGESLRISCTVSGYSFSKYWVGWVRQTPGKGLEWMGIIDPTDSDTRYSPSFQGQVTISVDNSINTAYLQWSSLKASDTAIYYCARRGQAKCVGNCPRDFMDVWGKGTTVTVSS

SEQ ID NO: 588 - protein, 112 aa, Artificial Sequence
  Description of Artificial Sequence: Synthetic light chain variable region amino acid sequence
SYVLTQPPSVSGAPGQRVTISCAGSSSNIGAGYEVHWYQQLPGTAPKLLIYANRNRPSGVPDRFSGSRSGTSASLAISGLQAEDEADYYCQSYDNNLSGSWVFGGGTKLTVL

SEQ ID NO: 589 - protein, 114 aa, Artificial Sequence
  Description of Artificial Sequence: Synthetic heavy chain variable region amino acid sequence
QVQLQQWGAGLLKPSETLSLTCAVYGGSFSGKYWSWIRQPPGKGLEWIGEFNHDGTTYYNPSLKSRVTISADTPKNQFSLTLHSVTAADTAVYYCARLTILSDWGQGTLVTVSS

SEQ ID NO: 590 - protein, 107 aa, Artificial Sequence
  Description of Artificial Sequence: Synthetic light chain variable region amino acid sequence
DIRMTQSPSSLSASVGDRVTITCQASQDISNYLHWYQQKPGKAPKLLIYDASNLETGVPSRFSGSGSGTDFTFTIHSLQPEDLATYYCQQYYDLPRTFGQGTKLEIK

SEQ ID NO: 591 - protein, 121 aa, Artificial Sequence
  Description of Artificial Sequence: Synthetic heavy chain variable region amino acid sequence
EVQLVESGAEVKKPGASVKVSCKASGYTFSSHAISWVRQAPGHGLEWMGWISVFNGNTNYAQKFQGRVTMTTDTSTSTAYMELRSLRSDDAAVYYCAREVIGVGEFYFDYWGQGTLVTVSS

SEQ ID NO: 592 - protein, 108 aa, Artificial Sequence
  Description of Artificial Sequence: Synthetic light chain variable region amino acid sequence
QSVLTQPPSVSVAPGQTARITCGGNNIGSKSVHWYQQKAGQAPVLVVYDDSDRPSGIPERFLGSNSGNTATLTISRVEAGDEADYYCQVWDSSGDFHVFGTGTKVTVL

SEQ ID NO: 593 - protein, 121 aa, Artificial Sequence
  Description of Artificial Sequence: Synthetic heavy chain variable region amino acid sequence
EVQLVESGGGLVKPGGSLRLSCSASGFAFSSYSMNWVRQAPGKGLEWVSSISASSSYIFYADSVKGRFTISRDNAKNSLYLQMNSLRAEDTAFYYCARALSPGYGDYRDYWGQGTLVTVSS

SEQ ID NO: 594 - protein, 110 aa, Artificial Sequence
  Description of Artificial Sequence: Synthetic light chain variable region amino acid sequence
QSVVTQPPSVSGAPGQRVTISCTGSSSNIGAGYDVHWYQQLPGAAPKLLIYGNNNRPSGVPDRFSGSKSGTSASLAITGLQAEDEADFYCQSYDHNLSVVFGGGTKLTVL

SEQ ID NO: 595 - protein, 121 aa, Artificial Sequence
  Description of Artificial Sequence: Synthetic heavy chain variable region amino acid sequence
QVQLVQSGAEVKKPGASVKVSCTASGYTFANNGISWVRQAPGQGLEWMGWISAYNGNTKYAQTVQGRVTLTTDTSTSTAYMELRSLTSDDTAVYYCAREMGVDAAATFDYWGQGTLVTVSS

SEQ ID NO: 596 - protein, 112 aa, Artificial Sequence
  Description of Artificial Sequence: Synthetic light chain variable region amino acid sequence
EIVMTQSPLFLSVTLGQPASISCRSSQSLVYSDTNTYLTWFQQRPGQSPRRLIYKVSNRDSGVPDRFSGSGSGTYFTLKISRVEAEDIGVYYCMQAIHWPRTFGQGTKLEIK

SEQ ID NO: 597 - protein, 118 aa, Artificial Sequence
  Description of Artificial Sequence: Synthetic heavy chain variable region amino acid sequence
QVQLVESGPGLVRPSQTLSLTCNVSGDFISRGTYYWSWIRQSAGKGLEWIGRIYTSGITDYSPSLKSRVTISVDTSKNQFFLKLASVTAADTAVYYCARGRGYYDSPWGQGTLVTVSS

SEQ ID NO: 598 - protein, 106 aa, Artificial Sequence
  Description of Artificial Sequence: Synthetic light chain variable region amino acid sequence
ETTLTQSPATLSLSPGERATLSCRASESVSTFLGWYQQKPGQAPRLLIYDASNRASGVPARFSGSGSGTDFTLTISSLEPEDFAVYYCQLRNKWLTFGPGTKVDIK

SEQ ID NO: 599 - protein, 122 aa, Artificial Sequence
  Description of Artificial Sequence: Synthetic heavy chain variable region amino acid sequence
QVQLVQSGAEVKKPGASVKVSCKASGYTFTSYGISWVRQAPGQGLEWMGWISAYNGNTNYAQNLQGRVTMTTDTSTSTAYMELRSLRSDDTAMYYCARDAFSRVGYWYFDLWGRGTLVTVSS

SEQ ID NO: 600 - protein, 108 aa, Artificial Sequence
  Description of Artificial Sequence: Synthetic light chain variable region amino acid sequence
SYELTQPPSVSVAPGQAARITCGGNNIGSKTVHWYQQKPSQAPVLVVYDDSDRPSGIPERFSGSNSGNTATLTISRVEAGDEADYYCQVWDSSGDHPVFGGGTKLTVL

SEQ ID NO: 601 - protein, 137 aa, Artificial Sequence
  Description of Artificial Sequence: Synthetic heavy chain variable region amino acid sequence
QVQLQESGPGLVKPSQTLSLTCTVSGVSISNSSGGYYWSWIRQHPGKGLEWIGYIYYSGSTYYNPSSGSTYYNPSLKSRVTVSVDTSKNQFSLKLTSVTAADTAVYYCARDIRGPHKHSLYNWFHPWGQGTLVTVSS

SEQ ID NO: 602 - protein, 107 aa, Artificial Sequence
  Description of Artificial Sequence: Synthetic light chain variable region amino acid sequence
DIQMTQSPSSLSASVGDRVTITCRASQSISSYLNWYQQKPGKAPKLLIYAASSLQTGVPSRFSGSGSGTDFTLTISSLQPEDFATYYCQQSYSTLRTFGQGTKVDIK

SEQ ID NO: 603 - protein, 132 aa, Artificial Sequence
  Description of Artificial Sequence: Synthetic heavy chain variable region amino acid sequence
QVQLVESGGGVVQPGRSLRLSCAASGFSFSNYGMHWVRQAPGKGLEWVVGISFDGSYIFHGGSVTGRFNISRDNSKNTLYLQVNSVRAEDTAVYYCARDPQYYDDWSGYSGLLHYYLYMDVWGKGTTVTVSS

SEQ ID NO: 604 - protein, 107 aa, Artificial Sequence
  Description of Artificial Sequence: Synthetic light chain variable region amino acid sequence
DIQLTQSPSTLSASVGDRVTITCRASQSIGTSLAWYQQIPGKAPKLLIYRASSLESGVPSRFSGGGSGTQFTLTISSLQPDDFATYYCQQYNNYSPTFGQGTKLEIK

SEQ ID NO: 605 - protein, 125 aa, Artificial Sequence
  Description of Artificial Sequence: Synthetic heavy chain variable region amino acid sequence
EVQLVESGGGVVQPGRSLRLSCVGSGFTFSRYGMQWVRQAPGKGLEWAAVIWNDGSNEHYADSVKGRFTISRDNSKNTMYLQMNSLRAEDTALYYCAREGEYSSSWSHWSYLDLWGRGTLVTVSS

SEQ ID NO: 606 - protein, 110 aa, Artificial Sequence
  Description of Artificial Sequence: Synthetic light chain variable region amino acid sequence
QPGLTQPPSASGTPGQRVTISCSGSTSNIGGNTVNWYQQLPGTAPTVLIYQNRQRPSGVPDRFSGSKSGTSASLAISGLQSDDEADYYCAAWDDSLNGWVFGGGTKLTVL

SEQ ID NO: 607 - protein, 123 aa, Artificial Sequence
  Description of Artificial Sequence: Synthetic heavy chain variable region amino acid sequence
EVQLLESGGGLVKPGGSLKLSCAASGFTLRSYYMHWVRQAPGRGLEWVSSISASSSYINYVDAVKGRFTVSRDNAKNSLFLQMNSLRAEDTAVYYCAREGGAMTNFGVVIDIWGQGTMVTVSS

SEQ ID NO: 608 - protein, 112 aa, Artificial Sequence
  Description of Artificial Sequence: Synthetic light chain variable region amino acid sequence
SYVLTQPPSVSGAPGQRVTISCTGSSSNIGAGYDVHWYQQLPGTAPKLLIYTNTNRPSGVPDRFSGSKSGTSASLAITGLQSDDEADYYCQSYDSSLSGPVVFGGGTKLTVL

SEQ ID NO: 609 - protein, 128 aa, Artificial Sequence
  Description of Artificial Sequence: Synthetic heavy chain variable region amino acid sequence
QVQLVQSGAEVKKPGESLKISCKASGYSLSNNWIAWVRQMPGKGLEWMGIVYLGDSDARYSPSFQGQVTFSADKSISTAYLQWSSLQASDTAMYFCARHHGDLVVTSDSRYFYGLDVWGQGTTVTVSS

SEQ ID NO: 610 - protein, 109 aa, Artificial Sequence
  Description of Artificial Sequence: Synthetic light chain variable region amino acid sequence
DIVMTQSPATLSVSPGERATLSCRASQSISSNLAWYQQKPGQAPRLLIYGASTRATGIPARFSGSGSGTEFTLTISSLQSEDFAVYYCQQYNNWPPSDTFGQGTRLEIK

SEQ ID NO: 611 - protein, 131 aa, Artificial Sequence
  Description of Artificial Sequence: Synthetic heavy chain variable region amino acid sequence
QVQLQESGPGLVKPSETLSLTCTVSGGSISGTTYYWAWIRQPPGKGLEWIGTIFYSGSTYYNPSLQSRVTTSVDASKNQMSLRLSSVTAADTAMYYCARHTSIYDNLTGFYSHLTGVLDMWGQGTMVTVSS

SEQ ID NO: 612 - protein, 109 aa, Artificial Sequence
  Description of Artificial Sequence: Synthetic light chain variable region amino acid sequence
DIQLTQSPATLSVSPGERATLSCRASQSVSTNLAWYQQKRGQAPRLLIYGASTRAIGIPARFSGSGSGTEFTLTISSLQSEDFAVYYCQQYNNWPPAYTFGQGTKVDIK

SEQ ID NO: 613 - protein, 123 aa, Artificial Sequence
  Description of Artificial Sequence: Synthetic heavy chain variable region amino acid sequence
QVQLVQSGAEVKRPGDSLKISCKGSGYSFTTSWIGWVRQVPGKGLEWMGIIYPGDSNTVYGPSLQGQVTISADKSTNTAYLQWSSLKASDTAMYYCARRDGGTDYLSDAFDIWGQGTFVTVSS

SEQ ID NO: 614 - protein, 107 aa, Artificial Sequence
  Description of Artificial Sequence: Synthetic light chain variable region amino acid sequence
DIQMTQSPSSLSASVGDRVTITCRTSQNIVIYLNWYQQKPGKAPKLLIFAASSLPSGVPSRFSGSGSGTDFTLTISSLQPEDVATYYCQQSYNTPGTFGQGTKVDIK

SEQ ID NO: 615 - protein, 117 aa, Artificial Sequence
  Description of Artificial Sequence: Synthetic heavy chain variable region amino acid sequence
EVQLVESGGGLVKPGGSLRLSCEASGFRLSDYYMTWIRQAPGKGLECISYISGGSTFKSYSDSVKGRFTISRDNTNLYLQMNSLRVEDTAVYYCARAPYLIYYMDVWGKGTTVTVSS

SEQ ID NO: 616 - protein, 113 aa, Artificial Sequence
  Description of Artificial Sequence: Synthetic light chain variable region amino acid sequence
QPVLTQPPSVSGAPGQRVSISCTGSNSNIGAGYDVHWYQQLPGTPPKLLIYDNNNRPSGVPDRFSGSKSGTSASLAITGLQAEDEADYYCQSYDNRLSGSQVLFGGGTKVTVL

SEQ ID NO: 617 - protein, 120 aa, Artificial Sequence
  Description of Artificial Sequence: Synthetic heavy chain variable region amino acid sequence
QVQLVQSGAEVKKPGSSVKVSCKASGGTFSNYPISWVRQAPGHGLEWMGRVVPTVGLANYAQNLQGRVTITADTSTNTVYMELRSLRSEDTGLYYCARRAVVDTYAFDIWGQGTLVTVSS

SEQ ID NO: 618 - protein, 112 aa, Artificial Sequence
  Description of Artificial Sequence: Synthetic light chain variable region amino acid sequence
QSALIQPASVSGFPGQSITISCTGASSDVGGYNFVSWYQQHPGKAPKLIIYEVTKRPSGVSNRFSGSESGNTASLTISGLQAEDEADYYCSSFRYTSSIVYVFGSGTKVTVL

SEQ ID NO: 619 - protein, 125 aa, Artificial Sequence
  Description of Artificial Sequence: Synthetic heavy chain variable region amino acid sequence
EVQLLESGGGLVKPGGSLRLSCAASGFTFSDYDMIWVRQAPGKGLEWVSSISRGSDYIYYADSLKGRFTISRDNARNSVTLQMNSLRAGDTALYFCARAELLDSGGYYLYYFDHWGQGTLVTVSS

SEQ ID NO: 620 - protein, 107 aa, Artificial Sequence
  Description of Artificial Sequence: Synthetic light chain variable region amino acid sequence
DIRMTQSPSSLSASVGDRVTITCRASQIIASYVNWYQKKPGKAPKVLIYAASRLQNGVPSRFSGSGSGTEFTLTISSLQPEDFATYYCQQSYSTSFTFGQGTKVDIK

SEQ ID NO: 621 - protein, 124 aa, Artificial Sequence
  Description of Artificial Sequence: Synthetic heavy chain variable region amino acid sequence
EVQLVESGGGLVQPGGSLRLSCSASGFTFRTYVMQWVRQAPGKGLEYVSAISSDGGSTDYADSVKGRFTVSRDNSKNTLYLQMSSLRAEDTAVYYCVKRGEGGNDYLYYYMDVWGKGTTVTVSS

SEQ ID NO: 622 - protein, 107 aa, Artificial Sequence
  Description of Artificial Sequence: Synthetic light chain variable region amino acid sequence
DIQVTQSPSSLSASVGDRVTITCRASQSITNYLNWYQQKPGKAPKVLIYAASSLQSGVPSRFSGSGSGTDFTLTISSLQPEDFATYYCQQSYLRPPTFGGGTKVEIK

SEQ ID NO: 623 - protein, 121 aa, Artificial Sequence
  Description of Artificial Sequence: Synthetic heavy chain variable region amino acid sequence
EVQLVESGGEVKKPGASVKVSCKASGYIFSNHGVSWVRQAPGQGLEWMGWISAYNGNAIYAQNLQGRVTLTTDTSTSTAYMELTSLTSDDTAIYYCARESGATAAAVMDYWGQGTLVTVSS

SEQ ID NO: 624 - protein, 112 aa, Artificial Sequence
  Description of Artificial Sequence: Synthetic light chain variable region amino acid sequence
DIVLTQTPLSLPVILGQPASISCRSSQSLVYSDGNTYLTWFQQRPGQSPRRLIYKVSNRDSGVPDRFSGSGSDTDFTLKISRVEAEDVGVYYCMQGIDWPRTFGQGTKVDIK

SEQ ID NO: 625 - protein, 133 aa, Artificial Sequence
  Description of Artificial Sequence: Synthetic heavy chain variable region amino acid sequence
EVQLLESGGGLVQPGGSLRLSCAASGFTFSSYAMNWVRQAPGKGLEWVSGISGSGESTYYADSVKGRFTISRDSSKNTVYLQMNSLRADDTAVYYCAKDQGYGVVVPAATRALPPRRYGMDVWGQGTTVTVSS

SEQ ID NO: 626 - protein, 109 aa, Artificial Sequence
  Description of Artificial Sequence: Synthetic light chain variable region amino acid sequence
EIVLTQSPGTLSLSPGERATLSCRASQSVSSTYLAWYQQKPGQAPRLLIYGASSRATGIPDRFSGSGSGTDFTLTITRLEPEDFAVYYCQQYGSSPPLTFGGGTKVDIK

SEQ ID NO: 627 - protein, 120 aa, Artificial Sequence
  Description of Artificial Sequence: Synthetic heavy chain variable region amino acid sequence
QVQLQESGPGLVKPSGTLSLTCVVSGGSIKSHNYWTWVRQPPGKGLEWVGEIYQSGRTNYNPSLNSRVTLSMDKSKNQLSLRLTSVTAADTAVYFCVGGGPFAPYYFQTWGQGTLVTVSS

SEQ ID NO: 628 - protein, 111 aa, Artificial Sequence
  Description of Artificial Sequence: Synthetic light chain variable region amino acid sequence
QSVLTQPPSVSGAPGQRVTISCTGSSSNIGAGYDVHWYQQLPGTAPKLLIYNNNNRPSGVPDRFSGSKSGTSASLAITGLQAEDEADYYCQSYDTSLSGYVFGTGTKVTVL

SEQ ID NO: 629 - protein, 121 aa, Artificial Sequence
  Description of Artificial Sequence: Synthetic heavy chain variable region amino acid sequence
EVQLVESGAEVRKPGASVKVSCKASGYTFSSNAISWVRQAPGQGLEWMGYISVFNGNTKYAQNLQGRVTMTTDTATSTVYMELRSLRYDDTAIYYCARESLGMGGFYFDHWGQGTLVTVSS

SEQ ID NO: 630 - protein, 107 aa, Artificial Sequence
  Description of Artificial Sequence: Synthetic light chain variable region amino acid sequence
SYELTQPPSVSVAPGQTARITCGANNIGSDSVHWYQQKPGQAPVLVVFDDRDRPSGIPERFSGSNSGNTATLTISRVEAGDEADYYCQVWMTSDRSVFGGGTKLTVL

SEQ ID NO: 631 - protein, 124 aa, Artificial Sequence
  Description of Artificial Sequence: Synthetic heavy chain variable region amino acid sequence
EVQLVESGGGLVQPGGSLRLSCAASGFTFSRYAMGWVRQAPGKGLEWVSTISDSGGSTFYADSVEGRFTIARDSSKNTLSLHMNSLRAEDTAIYYCAREAYSSSWYSGGWFDRWGQGTLVTVSS

SEQ ID NO: 632 - protein, 108 aa, Artificial Sequence
  Description of Artificial Sequence: Synthetic light chain variable region amino acid sequence
ETTLTQSPATLSVSPGERATLSCRASQSVSSNLAWYQQKPGQAPRLLIYGASTRATGIPARFSGSGSGAEFTLTINSLQSEDFAIYYCQQYNNWPQYTFGQGTKVDIK

SEQ ID NO: 633 - protein, 125 aa, Artificial Sequence
  Description of Artificial Sequence: Synthetic heavy chain variable region amino acid sequence
EVQLVESGGGVVQPGKSLRLSCAVSGFTFSDHDMHWVRQAPGKGLEWVAAIWSDRTTKYYGDFVKGRFTISRDNSKNTLYLQMNSLRAEDTAVYYCARGQIYKSGGYYLVHLDHWGQGTLVTVSS

SEQ ID NO: 634 - protein, 108 aa, Artificial Sequence
  Description of Artificial Sequence: Synthetic light chain variable region amino acid sequence
DIQVTQSPSSLSASVGDRVTITCRASQSIASYLNWYQQKPGKAPNLLIYAASNLQSEVPSRFSGSGSGTDFTLTISGLQPEDFATYYCQQSYNIRLLTFGGGTKVEIK

SEQ ID NO: 635 - protein, 123 aa, Artificial Sequence
  Description of Artificial Sequence: Synthetic heavy chain variable region amino acid sequence
QVQLVQSGGGLVKPGGSLRLSCEASGFNFRSYHMSWVRQAPGKGLEWVSSITAGSSYINYADSVKGRFTISRDNAKNSVFLQMNSLSAEDTAVYYCAREGLNMGVGGTWFDPWGQGTLVTVSS

SEQ ID NO: 636 - protein, 112 aa, Artificial Sequence
  Description of Artificial Sequence: Synthetic light chain variable region amino acid sequence
QAVVTQEPSVSGAPGQRVTISCTGSSSNIGAGYDVHWYQQLPGTAPKLLIYGNNNRPSGVPDRFSGSKSATSASLAITGLQADDEADYYCQSYDRSLSGSWVFGTGTKVTVL

SEQ ID NO: 637 - protein, 130 aa, Artificial Sequence
  Description of Artificial Sequence: Synthetic heavy chain variable region amino acid sequence
EVQLVESGGGLVRPGRSLRLSCAASGFTFSMFSMNWVRQAPGKGLEWLAYIGGSGSTIDYANSVSGRFTISRDNAKNSLYLQMNSLRDEDTAVYYCARIGLQTYNSHSSSSSPARAFDVWGQGTTVTVSS

SEQ ID NO: 638 - protein, 107 aa, Artificial Sequence
  Description of Artificial Sequence: Synthetic light chain variable region amino acid sequence
DIVLTQSPSSLSASVGDRVTITCRASQSIGRFLNWYQQKPGKAPKLLIYAASSLESGVPSRFSGSGSGTQFSLTISSLQPEDFTTYYCQQSYSTPTTFGGGTKVDIK

SEQ ID NO: 639 - protein, 121 aa, Artificial Sequence
  Description of Artificial Sequence: Synthetic heavy chain variable region amino acid sequence
EVQLVESGGGLVKPGGSLRLSCAASGFSFSNYYMSWVRQAPGKGLEWISYISGGSTYANLADSVKGRFTISRDNTKNSMYLQMTSLRPDDTAVYYCARIHGTHGPFYFDYWGQGTLVTVSS

SEQ ID NO: 640 - protein, 112 aa, Artificial Sequence
  Description of Artificial Sequence: Synthetic light chain variable region amino acid sequence
QSVLTQPPSVSGAPGQRVTISCTGSSSNIGAGYDVHWYQQLPGTAPKLLIHANSNRPSGVPDRFSGSKSGTSASLAITGLQAEDEADYYCQSYDNSLNAYYVFGTGTKLTVL

SEQ ID NO: 641 - protein, 125 aa, Artificial Sequence
  Description of Artificial Sequence: Synthetic heavy chain variable region amino acid sequence
EVQLVESGGGLVRPGGSLRLSCAASGFTFSSYAMDWVRQAPGKGLEWVSSISASSSFISYTDSVKGRFTISRDNAKNSLFLQMDNVTAEDTAVYYCARDYYESGRYFYGNPFDIWGQGTMVTVSS

SEQ ID NO: 642 - protein, 112 aa, Artificial Sequence
  Description of Artificial Sequence: Synthetic light chain variable region amino acid sequence
QPVLTQPPSVSGAPGQRVTISCTGSGSNIGAGFDVHWYQQLPGTAPKLLIYANSDRPSGVPDRFSASKSGTSASLAITGLQAEDEAHYYCQSYDNSLGGLCVFGTGTKLTVL

SEQ ID NO: 643 - protein, 124 aa, Artificial Sequence
  Description of Artificial Sequence: Synthetic heavy chain variable region amino acid sequence
QVQLVESGGGLVKPGGSLRLSCVVSGFTFRDYYMSWIRQAPGKGLEWISYISPSSTYTNYADSVRGRFTISRDNAENSLYLQMNSLRAEDTAVYYCARVNIAATGAGGVFLDYWGQGTTVTVSS

SEQ ID NO: 644 - protein, 112 aa, Artificial Sequence
  Description of Artificial Sequence: Synthetic light chain variable region amino acid sequence
QPVLTQPPSVSGAPGQRVTISCAGSSSNIGAGYDVHWYQQLPGTAPKLLIYGNINRPSGVPDRFSGSKSGTSASLAITGLQAEDEADYYCQSYDSSLSGSYVFGTGTKVTVL

SEQ ID NO: 645 - protein, 120 aa, Artificial Sequence
  Description of Artificial Sequence: Synthetic heavy chain variable region amino acid sequence
EVQLVESGGGLVKPGGSLRLSCAASGFRLSDYYMSWIRQAPGKGLEWISDISGGSTYTNYADSVKGRLTISRDNAQNSLYLQMNSLRAEDTAVYYCARWGSGGPDAFHFWGQGTTVTVSS

SEQ ID NO: 646 - protein, 112 aa, Artificial Sequence
  Description of Artificial Sequence: Synthetic light chain variable region amino acid sequence
QSVLTQPPSVSGVPGQRVTISCTGSRSNIGAGYDVHWYRQLPGTAPKLLIYGNSNRPSGVPDRFSGSKSGTSASLAITGLQADDEADYYCQSYDSSLSGSVIFGGGTKVTVL

SEQ ID NO: 647 - protein, 125 aa, Artificial Sequence
  Description of Artificial Sequence: Synthetic heavy chain variable region amino acid sequence
EVQLLESGGGLVKPGGSLRLSCAASGFTFSDYYMSWIRQAPGKGLEWVSNISGGSTYTNYADSVKGRFTISRDNAKNSLYLQMNSLRAEDTAVYYCAREAYGSGNYYNPNWLDPWGQGTLVTVSS

SEQ ID NO: 648 - protein, 111 aa, Artificial Sequence
  Description of Artificial Sequence: Synthetic light chain variable region amino acid sequence
QSVLTQPPSVSGAPGQRVTISCTGSSSNIGAGYDVHWYQQLPGTAPKLLIYGNRNRPSGVPDRFSGSKSGTSASLAITGLQAEDEADYYCQSYDSSLSGSVFGGGTKLTVL

SEQ ID NO: 649 - protein, 120 aa, Artificial Sequence
  Description of Artificial Sequence: Synthetic heavy chain variable region amino acid sequence
EVQLLESGGGLVKPGGSLRLSCEVSGFRLSDYYMSWIRQAPGKGLEWVSHISGGSTYTNYADSVKGRFTISRDNGKKSMYLQMNSLRAEDTALYYCAKWGSGGPEAFDIWGRGTMVTVSS

SEQ ID NO: 650 - protein, 112 aa, Artificial Sequence
  Description of Artificial Sequence: Synthetic light chain variable region amino acid sequence
QSALIQPPSVSGAPGQRVTISCTGSSSNIGAGYDVHWYQQIPGTAPKLLIYGNNNRPSGVPDRFSGSKSGTSASLAITGLQAEDEADYYCQSYDNSLSGSVVFGGGTKLTVL

SEQ ID NO: 651 - protein, 123 aa, Artificial Sequence
  Description of Artificial Sequence: Synthetic heavy chain variable region amino acid sequence
EVQLLESGGGLVKPGGSLRLSCAASRFAFSNYYMTWIRQAPGKGLEWISNISGGSTFTNYADSVKGRFTISRDNAKNSVHLQMNSLRAEDTAVYYCVREASVAAGTPEGFDIWGQGTMVTVSS

SEQ ID NO: 652 - protein, 111 aa, Artificial Sequence
  Description of Artificial Sequence: Synthetic light chain variable region amino acid sequence
QSVLTQPPSVSGAPGQRVIISCTGSSSNIGAGYDVNWYQQLPGTAPKLLMYGNRNRASGVPDRFSGSKSGTSASLAITGLQAEDEADYYCHSYDSSLGGSVFGGGTKLTVL

SEQ ID NO: 653 - protein, 124 aa, Artificial Sequence
  Description of Artificial Sequence: Synthetic heavy chain variable region amino acid sequence
EVQLVESGGGLVKPGGSLKLSCVASGLKFSSYSMNWVRQAPGKGLEWVSSVSAGSSYTNYADSVKGRFTISRDNAKNSLYLQMNSLRVDDTAVYYCATERCSGGSCYLHGFDPWGQGTTVTVSS

SEQ ID NO: 654 - protein, 110 aa, Artificial Sequence
  Description of Artificial Sequence: Synthetic light chain variable region amino acid sequence
QSVLTQPPSVSGAPGQRVTISCTGSSSNIGAGYDVHWYQQLPGTAPKLLIFDNIIRPSGVPDRFSGSKSGTSASLAITGLQADDEADYYCQSYDKSGDYVFGTGTKVTVL

SEQ ID NO: 655 - protein, 120 aa, Artificial Sequence
  Description of Artificial Sequence: Synthetic heavy chain variable region amino acid sequence
QVQLQESGPGLVKPSGTLSLTCAVSGDSITTSNWWSWVRQPPGKGLEWIGEIYHSGVTRYNPSLKSRLSISLDKSRNQFSLKLSSVTAADTAVYYCARDEALFGHWFDPWGQGTLVTVSS

SEQ ID NO: 656 - protein, 109 aa, Artificial Sequence
  Description of Artificial Sequence: Synthetic light chain variable region amino acid sequence
QSVLTQPRSVSGSPGQSVTISCTGSSSDIGSYNYVSWYQQHPGKAPKLMLYDVSKRPSGVPDRFSGSKSVKTASLTISGLQAEDEADYYCCTYAGNSVVFGGGTKLTVL

SEQ ID NO: 657 - protein, 121 aa, Artificial Sequence
  Description of Artificial Sequence: Synthetic heavy chain variable region amino acid sequence
EVQLVESGAEVKKPGASVTVSCKASGYTFTSNTISWLRQAPGQGLEWLGWVSASNGNTKYAQKFQGRVTMTTDTSATTAYMEVRTLRHDDTAIYYCARDILDMGGFHFDNWGQGTLVTVSS

SEQ ID NO: 658 - protein, 108 aa, Artificial Sequence
  Description of Artificial Sequence: Synthetic light chain variable region amino acid sequence
SYVLTQPPSVSVAPGQTARITCGGNNIGNKHVHWYKQKPGQAPVLVVYDDSDRPSGIPERFSGSNSGNTATLTVSRVEAGDEADFYCQVWDNTNDHPVFGGGTKVTVL

SEQ ID NO: 659 - protein, 120 aa, Artificial Sequence
  Description of Artificial Sequence: Synthetic heavy chain variable region amino acid sequence
EVQLVETGGGLVKPGGSLRLSCEASGFNFRSYSMNWVRQAPGKGLEWVSSISASSSYINYADSVKGRFTISRDNSKNSLYLQMNSLRAEDTGVYYCARVLVHYYYGMDVWGQGTTVTVSS

SEQ ID NO: 660 - protein, 110 aa, Artificial Sequence
  Description of Artificial Sequence: Synthetic light chain variable region amino acid sequence
QSVLTQPPSVSAAPGQRVTISCTGTSSNIGAGYDVHWYQQLPGRAPKLLILGNNNRPSGVPDRFSGSKSGTSASLAITGLQAEDEADYYCQTYDKTLMEIFGGGTKLTVL

SEQ ID NO: 661 - protein, 123 aa, Artificial Sequence
  Description of Artificial Sequence: Synthetic heavy chain variable region amino acid sequence
EVQLVETGGGLVKPGGSLRLSCAASPFAFSNYYMSWIRQAPGKGLEWISNISGGSTFTNYADSVKGRFTISRDNARNSLYLLMNNLRTEDTAVYYCAREASVAAGTPEGFDVWGQGTTVTVSS

SEQ ID NO: 662 - protein, 111 aa, Artificial Sequence
  Description of Artificial Sequence: Synthetic light chain variable region amino acid sequence
QSVVTQPPSVSGAPGQRVTISCTGSSSNIGAGYDVNWYQQFPGTAPKLLIYGNRNRPSGVPARFSGSKSGASASLAITGLQAEDEADYYCHSYDSGLSGSVFGGGTKLTVL

SEQ ID NO: 663 - protein, 118 aa, Artificial Sequence
  Description of Artificial Sequence: Synthetic heavy chain variable region amino acid sequence
EVQLVESGGGLVQPGGSLRLSCAASGFTFSGYEMNWVRQAPGKGLEWLSYISSSGGIIYYADSVKGRFTISRDNARNSLFLQMNSLRAEDTAVYSCARARLLDGFDIWGQGTMVTVSS

SEQ ID NO: 664 - protein, 107 aa, Artificial Sequence
  Description of Artificial Sequence: Synthetic light chain variable region amino acid sequence
DIQVTQSPSTLSASVGDRVTITCRASQSIGSWLAWYQQKPGKAPKLLIYKASSLESGVPSRFSGSGSGTEFTLTISSLQPDDFATYYCQQYNSYSYTFGQGTKVEIK

SEQ ID NO: 665 - protein, 125 aa, Artificial Sequence
  Description of Artificial Sequence: Synthetic heavy chain variable region amino acid sequence
EVQLLESGGGLVKPGGSLRLSCVASGFRFTSYSMNWVRQAPGKGLEWVSSISASSSYVDYADSLKGRFTISRDNAQNSLFLQMNSLRAEDTAVYYCARDYYDSGNYHSPFPMDVWGQGTTVTVSS

SEQ ID NO: 666 - protein, 108 aa, Artificial Sequence
  Description of Artificial Sequence: Synthetic light chain variable region amino acid sequence
QSVLTQPPSVSGAPGQRVTISCTGSRSNIGAGYDVHWYQQLPGTAPKLLIYGNNKRPSGVPDRFSGSKSGTSASLAITGLQAEDEADYYCQSYDSGPIFGGGTKVTVL

SEQ ID NO: 667 - protein, 125 aa, Artificial Sequence
  Description of Artificial Sequence: Synthetic heavy chain variable region amino acid sequence
EVQLLESGGGLVKPGGSLRLSCAASGFTSGFTFSDFYMSWIRLTPGKGLEWISYISTHSTSTNYADSVRGRFIISRDDARNSLFLQMNSLRAEDTAVYYCAGYYYGSGSYFFDHWGQGTLVTVSS

SEQ ID NO: 668 - protein, 106 aa, Artificial Sequence
  Description of Artificial Sequence: Synthetic light chain variable region amino acid sequence
ETTLTQSPATLSVSPGERATLSCRASQSVSSNVAWYQQKPGQAPRLLIYSASSRDTGIPVRFSGSGSGTEFTLSISSLQSEDFAVYYCQQYSDWPTFGQGTKVEIK

SEQ ID NO: 669 - protein, 120 aa, Artificial Sequence
  Description of Artificial Sequence: Synthetic heavy chain variable region amino acid sequence
QVQLVQSGAEVKKPGESLRISCQYSAYGFSTYWISWVRQLPGKGLEWMGRIDPSDSHTTYSPSFQGHVTLSADKSISTVYLQWSSLKASDTAMYYCARHQEYSGSDLDSWGQGTLVTVSS

SEQ ID NO: 670 - protein, 109 aa, Artificial Sequence
  Description of Artificial Sequence: Synthetic light chain variable region amino acid sequence
QPVLTQPPSVSAAPGQRVTISCSGTRSNIGYNFVSWYQQLPGTAPKLLIYDNNKRPSGIPDRFSGSKSGTSATLAITGLQTGDEADYYCGTWDSSLSALFGGGTKVTVL

SEQ ID NO: 671 - protein, 121 aa, Artificial Sequence
  Description of Artificial Sequence: Synthetic heavy chain variable region amino acid sequence
EVQLLESGGGVVQPGRSLRLSCVASGFTFSTYGVHWVRQAPGKGLEWVAVISYDGANKDYADSVKGRFTISRDNSKNTLYLQMNSLRAEDTAVYYCAKMITRVLPGGFDRWGQGTLVTVSS

SEQ ID NO: 672 - protein, 108 aa, Artificial Sequence
  Description of Artificial Sequence: Synthetic light chain variable region amino acid sequence
EIVMTQSPGTLSLSPGERATLSCRASQSVSSAYLAWYQQKPGQAPRLLIYDASRRATGIPDRFSGSGSGTDFTLTISRLEPEDFAVYYCQQYGSSRFTFGQGTKVEIK

SEQ ID NO: 673 - protein, 121 aa, Artificial Sequence
  Description of Artificial Sequence: Synthetic heavy chain variable region amino acid sequence
EVQLLESGAEVKKPGASVKVSCKASGYTFSNYGISWVRQAPGQGLEWMGWISVYNGNTEYAQKFQGRLTMTTDTSTSTAYMELRSLRSDDTAVYYCARDPPAVAASFMDVWGQGTTVTVSS

SEQ ID NO: 674 - protein, 112 aa, Artificial Sequence
  Description of Artificial Sequence: Synthetic light chain variable region amino acid sequence
EIVLTQSPLSLPVTLGQPASISCRSSQSLVHSEGNTYLSWFQQRPGQSPRRLIYKVSNRDSGVPDRFSGSGSGTDFTLKISRVEAEDVGLYFCMQGTHWPPTFGGGTKVEIK

SEQ ID NO: 675 - protein, 124 aa, Artificial Sequence
  Description of Artificial Sequence: Synthetic heavy chain variable region amino acid sequence
QVQLVESGGGLVKPGGSLRLSCAASGFSISSYSMNWVRQAPGKGLEWVSSISGSSSYIYYGDSVKGRFTISRDNARNSLYLQMNSLRAEDTAVYYCARGDIAAAGTITYYFAHWGQGTLVTVSS

SEQ ID NO: 676 - protein, 111 aa, Artificial Sequence
  Description of Artificial Sequence: Synthetic light chain variable region amino acid sequence
QSVLTQPPSVSGAPGQRVTISCTGSSSNIGAGYDVHWYQQLTGTAPKLLIFGNNNRPSGVPDRFSGSKSGTSASLAITGLQAEDEADYYCQSYDSSLSGAVFGGGTQLTVL

SEQ ID NO: 677 - protein, 123 aa, Artificial Sequence
  Description of Artificial Sequence: Synthetic heavy chain variable region amino acid sequence
EVQLLESGGGLVKPGGSLRLSCAASGFSFSSYTMNWVRQAPGKGLEWVSSITGGSSYIDYAGSLKGRFTISRDNAKNSLYLQMNSLRVEDTAVYYCARDFPNIAVGGKTLDYWGQGTLVTVSS

SEQ ID NO: 678 - protein, 110 aa, Artificial Sequence
  Description of Artificial Sequence: Synthetic light chain variable region amino acid sequence
QPVLTQPPSVSGAPGQRVTISCTGSSSNIGAGYDVHWFQQLPGTAPKLLIYVNNNRPSGVPDRFSGSKSGTSASLAITGLQAEDEADYYCQSYDRLSAVVFGGGTKVTVL

SEQ ID NO: 679 - protein, 121 aa, Artificial Sequence
  Description of Artificial Sequence: Synthetic heavy chain variable region amino acid sequence
EVQLVESGGGLVQPGRSLRLSCVASGFTFDDYAMHWVRQAPGKGLEWVSGINWNSGGIGYADSVKGRFTISRDNTKNSLYLQMNSLRAEDTALYYCAKDGSALMGYGVEVWGQGTTVTVSS

SEQ ID NO: 680 - protein, 110 aa, Artificial Sequence
  Description of Artificial Sequence: Synthetic light chain variable region amino acid sequence
SYELTQPPSASGTPGQRVTISCSGSNSNIGNNYVYWYQQLPGTAPKLLIYRNNQWPSGVPDRFSASKSGTSASLAISGLRSEDEADYYCASWDDSLSALVFGGGTKLTVL

SEQ ID NO: 681 - protein, 124 aa, Artificial Sequence
  Description of Artificial Sequence: Synthetic heavy chain variable region amino acid sequence
EVQLVESGPGLVKPSQTLSLTCAISGDSVSSNSVAWNWIRQSPSRGLEWLGRTYYQSKWYNDYAVSVKSRISVNPDTSKNQFSLQLNSLTPEDTAVYYCVRGCSWGFGWYFDLWGRGTLVTVSS

SEQ ID NO: 682 - protein, 111 aa, Artificial Sequence
  Description of Artificial Sequence: Synthetic light chain variable region amino acid sequence
QSVLTQPPSVSGAPGQRVTISCTGSSSNIGAIYDVHWYQQFPGTAPKLLIYGNTNRPSGVPDRFSGSKSGTSASLAITGLQAEDEADYYCQSYDSSLSGYVFGTGTKVTVL

SEQ ID NO: 683 - protein, 125 aa, Artificial Sequence
  Description of Artificial Sequence: Synthetic heavy chain variable region amino acid sequence
EVQLVESGGGLIQPGGSLRLSCAASGFTFSTYEMNWVRQAPGKGLEWVSSISTSGSTKDYAGSVKGRFTVSRDNAKNSLYLQMNSLRAEDTAIYYCARVYYYDSSGYYLALFDYWGQGTLVTVSS

SEQ ID NO: 684 - protein, 108 aa, Artificial Sequence
  Description of Artificial Sequence: Synthetic light chain variable region amino acid sequence
EIVLTQSPSSLSASVGDRVTITCRASQSIASYLNWYQQKPGKAPKLLIYAASSLRSGVPSRFSGSGSGTDFTLTISSLQPEDFATYYCQQSYSTPSLTFGGGTKLEIK

SEQ ID NO: 685 - protein, 125 aa, Artificial Sequence
  Description of Artificial Sequence: Synthetic heavy chain variable region amino acid sequence
QVQLVESGPGLVRPSGTLSLTCAVSGGSISGKNWWSWVRQPPGKGLEWIGEIDHSGSTNYNPSLKSRVTISVDKSKNQFSLKLSSVTAADTAVYYCARTGLYDSSGYYLYYFNYWGQGTLVTVSS

SEQ ID NO: 686 - protein, 107 aa, Artificial Sequence
  Description of Artificial Sequence: Synthetic light chain variable region amino acid sequence
EIVMTQSPSSLSASVGDRVTISCRASQTIASYVNWYQQRPGKAPNLLIFAASNLQTGVPSRFRGSGSGTVFTLTISSLQPEDFATYYCQQSYSTPRTFGQGTKVDIK

SEQ ID NO: 687 - protein, 119 aa, Artificial Sequence
  Description of Artificial Sequence: Synthetic heavy chain variable region amino acid sequence
EVQLVESGGGLVKPGGSLRLSCAASGFTFSSYSMNWVRQAPGKGLEWVSSISSSSSYIYYADSVKGRFTISRDNAKNSLYLQMNSLRAEDTAVYYCARDRGDGYNYDYWGQGTLVTVSS

SEQ ID NO: 688 - protein, 110 aa, Artificial Sequence
  Description of Artificial Sequence: Synthetic light chain variable region amino acid sequence
QPVLTQPPSVSGAPGQRVTISCTGSSSNIGAGYDVHWYQQLPGTAPKLLIYGNSNRPSGVPDRFSGSKSGTSASLAITGLQAEDEADYYCQSYDSSLSVVFGGGTKVTVL

SEQ ID NO: 689 - protein, 123 aa, Artificial Sequence
  Description of Artificial Sequence: Synthetic heavy chain variable region amino acid sequence
EVQLVESGGGLVQPGRSLRLSCAASGFTFDDYAMHWVRQAPGKGLEWVSGISWNSGSIGYADSVKGRFTISRDNAKNSLYLQMNSLRAEDTALYYCAKDGRFSLSHTYYFDYWGQGTLVTVSS

SEQ ID NO: 690 - protein, 111 aa, Artificial Sequence
  Description of Artificial Sequence: Synthetic light chain variable region amino acid sequence
QPVLTQPPSASGSPGQSVTISCTGTSSDVGGYNYVSWYQQHPGKAPKLMIYEVSKRPSGVPNRFSGSKSGNTASLTVSGLQAEDEADYYCSSYAGSNNLYVFGTGTKVTVL

SEQ ID NO: 691 - protein, 119 aa, Artificial Sequence
  Description of Artificial Sequence: Synthetic heavy chain variable region amino acid sequence
QVQLVESGGGLVKPGGSLRLSCAASGFTFSSYSMNWVRQAPGKGLEWVSSISSSSSYIYYADSVKGRFTISRDNAKNSLYLQMNSLRAEDTAVYYCAREANWGVAFDIWGQGTMVTVSS

SEQ ID NO: 692 - protein, 110 aa, Artificial Sequence
  Description of Artificial Sequence: Synthetic light chain variable region amino acid sequence
QSVVTQPPSVSGAPGQRVTISCTGSSSNIGAGYDVHWYQQLPGTAPKLLIYGNSNRPSGVPDRFSGSKSGTSASLAITGLQAEDEADYYCQSYDSSLSYVFGTGTKVTVL

SEQ ID NO: 693 - protein, 125 aa, Artificial Sequence
  Description of Artificial Sequence: Synthetic heavy chain variable region amino acid sequence
EVQLVESGGGLVQPGGSLRLSCAASGFTFSSYEMNWVRQAPGKGLEWVSYISSSGSTIYYADSVKGRFTISRDNAKNSLYLQMNSLRAEDTAVYYCAKSYIYDSSGYYLYYFDYWGQGTLVTVSS

SEQ ID NO: 694 - protein, 107 aa, Artificial Sequence
  Description of Artificial Sequence: Synthetic light chain variable region amino acid sequence
EIVMTQSPSSLSASVGDRVTITCRASQSISSYLNWYQQKPGKAPKLLIYAASSLQSGVPSRFSGSGSGTDFTLTISSLQPEDFATYYCQQSYSTPGTFGQGTKVDIK

SEQ ID NO: 695 - protein, 122 aa, Artificial Sequence
  Description of Artificial Sequence: Synthetic heavy chain variable region amino acid sequence
QVQLVQSGGGLVQPGGSLRLSCAASGFTFSDHYMDWVRQAPGKGLEWVGRTRNKANSYTTEYAASVKGRFTISRDDSKNSLYLQMNSLKTEDTAVYYCARVGYYYYYGMDVWGQGTTVTVSS

SEQ ID NO: 696 - protein, 106 aa, Artificial Sequence
  Description of Artificial Sequence: Synthetic light chain variable region amino acid sequence
SYVLTQPPSVSVSPGQTASITCSGDKLGDKYACWYQQKPGQSPVLVIYQDSKRPSGIPERFSGSNSGNTATLTISGTQAMDEADYYCQAWDSSTPLFGGGTKVTVL

SEQ ID NO: 697 - protein, 121 aa, Artificial Sequence
  Description of Artificial Sequence: Synthetic heavy chain variable region amino acid sequence
QVTLKESGPALVKPTQTLTLTCTFSGFSLSTSGMCVSWIRQPPGKALEWLALIDWDDDKYYSTSLKTRLTISKDTSKNQVVLTMTNMDPVDTATYYCARSPGRAVAGTDYWGQGTLVTVSS

SEQ ID NO: 698 - protein, 107 aa, Artificial Sequence
  Description of Artificial Sequence: Synthetic light chain variable region amino acid sequence
SYELTQPPSVSVSPGQTASITCSGDKLGDKYACWYQQKPGQSPVLVIYQDSKRPSGIPERFSGSNSGNTATLTISGTQAMDEADYYCQAWDSSTAVVFGGGTKLTVL

SEQ ID NO: 699 - protein, 120 aa, Artificial Sequence
  Description of Artificial Sequence: Synthetic heavy chain variable region amino acid sequence
EVQLVESGGGLVKPGGSLRLSCAASGFTFSSYSMNWVRQAPGKGLEWVSSISSSSSYIYYADSVKGRFTISRDNAKNSLYLQMNSLRAEDTAVYYCARDYSSGWYYFDYWGQGTLVTVSS

SEQ ID NO: 700 - protein, 111 aa, Artificial Sequence
  Description of Artificial Sequence: Synthetic light chain variable region amino acid sequence
QPVLTQPPSVSGAPGQRVTISCTGSSSNIGAGYDVHWYQQLPGTAPKLLIYGNSNRPSGVPDRFSGSKSGTSASLAITGLQAEDEADYYCQSYDSSLSGSVFGGGTKLTVL

SEQ ID NO: 701 - protein, 124 aa, Artificial Sequence
  Description of Artificial Sequence: Synthetic heavy chain variable region amino acid sequence
EVQLVESGGGVVQPGRSLRLSCAASGFTFSSYAMHWVRQAPGKGLEWVAVISYDGSNKYYADSVKGRFTISRDNSKNTLYLQMNSLRAEDTAVYYCARAVEQQLFIWYYGMDVWGQGTTVTVSS

SEQ ID NO: 702 - protein, 107 aa, Artificial Sequence
  Description of Artificial Sequence: Synthetic light chain variable region amino acid sequence
SYELIQPPSVSVSPGQTASITCSGDKLGDKYACWYQQKPGQSPVLVIYQDSKRPSGIPERFSGSNSGNTATLTISGTQAMDEADYYCQAWDSSTDVVFGGGTQLTVL

SEQ ID NO: 703 - protein, 125 aa, Artificial Sequence
  Description of Artificial Sequence: Synthetic heavy chain variable region amino acid sequence
QVQLVQSGAEVKKPGASVKVSCKASGYTFTSYGISWVRQAPGQGLEWMGWISAYNGNTNYAQKLQGRVTMTTDTSTSTAYMELRSLRSDDTAVYYCARESALSRDGYNYGDVDYWGQGTLVTVSS

SEQ ID NO: 704 - protein, 112 aa, Artificial Sequence
  Description of Artificial Sequence: Synthetic light chain variable region amino acid sequence
ETTLTQSPLSLPVTLGQPASISCRSSQSLVYSDGNTYLNWFQQRPGQSPRRLIYKVSNRDSGVPDRFSGSGSGTDFTLKISRVEAEDVGVYYCMQGTHWPPTFGQGTKLEIK

SEQ ID NO: 705 - protein, 123 aa, Artificial Sequence
  Description of Artificial Sequence: Synthetic heavy chain variable region amino acid sequence
EVQLLESGGGLVKPGGSLRLSCAASGFTFSSYSMNWVRQAPGKGLEWVSSISSSSSYIYYADSVKGRFTISRDNAKNSLYLQMNSLRAEDTAVYYCAREGASGYNYRYYFDYWGQGTLVTVSS

SEQ ID NO: 706 - protein, 112 aa, Artificial Sequence
  Description of Artificial Sequence: Synthetic light chain variable region amino acid sequence
QSVLTQPPSVSGAPGQRVTISCTGSSSNIGAGYDVHWYQQFPGAAPKLLIYGNNNRPSGVPDRFSGSKSGTSASLAITGLQADDEADYYCQSYDSSLSGYVVFGGGTKLTVL

SEQ ID NO: 707 - protein, 120 aa, Artificial Sequence
  Description of Artificial Sequence: Synthetic heavy chain variable region amino acid sequence
EVQLLESGGGVVQPGRSLRLSCAASGFTFSDYGMHWVRQAPGKGLEWVAVIWYDGSYKYYADSVKGRFTISRDNSKNTLFLQMNSLRAEDTAVYYCARESLQTHDAFDIWGQGTMVTVSS

SEQ ID NO: 708 - protein, 108 aa, Artificial Sequence
  Description of Artificial Sequence: Synthetic light chain variable region amino acid sequence
DIQMTQSPSSLSASVGDRVTITCRASQGISNSLAWYQQKPGKAPKLLLYAASRLESGVPSRFSGSGSGTDYTLTINSLQPEDFATYFCQQYYSTLTWTFGQGTKVDIK

SEQ ID NO: 709 - protein, 122 aa, Artificial Sequence
  Description of Artificial Sequence: Synthetic heavy chain variable region amino acid sequence
EVQLLESGGGLVKPGGSLRLSCAASGFTFSDYYMSWIRQAPGKGLEWVSYISSSGSTIYYADSVKGRFTISRDNAKNSLYLQMNSLRAEDTAVYYCAREIGGSYTGGAFDIWGQGTMVTVSS

SEQ ID NO: 710 - protein, 108 aa, Artificial Sequence
  Description of Artificial Sequence: Synthetic light chain variable region amino acid sequence
SYELTQPPSVSVAPGQTARITCGGNNIGSKSVHWYQQKPGQAPVLVVYDDSDRPSGIPERFSGSNSGNTATLTISRVEAGDEADYYCQVWDSSSDHVVFGGGTKVTVL

SEQ ID NO: 711 - protein, 120 aa, Artificial Sequence
  Description of Artificial Sequence: Synthetic heavy chain variable region amino acid sequence
QVQLVQSGAEVKRPGASVKVSCKASEYTFNFHDINWVRQAPGQGLEWMGWMNPKSGNTGYAQKFQGRVTMTRDTSKNTAYLELSSLRSEDTAVYYCARGYGTSWSSDSWWGQGTLVTVSS

SEQ ID NO: 712 - protein, 109 aa, Artificial Sequence
  Description of Artificial Sequence: Synthetic light chain variable region amino acid sequence
SYELTQLPSVSVSPGQTARITCSGDALSKQFVYWYQQKPGLAPMLVIYKDTNRPSWIPERFSGSGSGTTATLTISEVQAEDEADYYCQSVDNSGTYGWVFGGGTKVTVL

SEQ ID NO: 713 - protein, 124 aa, Artificial Sequence
  Description of Artificial Sequence: Synthetic heavy chain variable region amino acid sequence
EVQLVESGPGLVKPSETLSLTCTVSGGSINSYSWTWIRQPPGKGLEWLGSFDYSGSNTYNPSLKSRVTIAVDTSKNQFSLKLTSATAADTAVYYCARAPVYDSSGYYLYYFDNWGQGTLVTVSS

SEQ ID NO: 714 - protein, 108 aa, Artificial Sequence
  Description of Artificial Sequence: Synthetic light chain variable region amino acid sequence
DIQMTQSPSSLSASVGDRVTITCRASQSIASYLNWYQQKPGKAPKLLIFAASNLHSGVPSRFSGSGSGTTFTLTISSLQPEDFATYYCQQSYSIRFFTFGPGTKLEIK

SEQ ID NO: 715 - protein, 124 aa, Artificial Sequence
  Description of Artificial Sequence: Synthetic heavy chain variable region amino acid sequence
QVQLQQWGAGLLKPSETLSLTCAVYGGSFSDYSWTWIRQPPGKGLEWIGEISHTGITNYNPSLKSRVNISVDTSKNQFSLKLSSVTAADTAVYYCARADAYDSSGYYVYYFDYWGQGTLVTVSS

SEQ ID NO: 716 - protein, 107 aa, Artificial Sequence
  Description of Artificial Sequence: Synthetic light chain variable region amino acid sequence
DIQVTQSPPSLSASVGDRVTITCRASQTIASYLNWYHQKPGKAPELLIYAASSLQSGVPSRFSGSGSGTAFTLTISSLQPEDFATYYCQQSYSAPPSFGQGTKVEIK

SEQ ID NO: 717 - protein, 124 aa, Artificial Sequence
  Description of Artificial Sequence: Synthetic heavy chain variable region amino acid sequence
EVQLVESGPTLVKPTQTLTLTCTFSGFSLSTSGVGVGWIRQPPGKALEWLALIYWDDDKRYSPSLKSRLTITKDTSKNQVVLTMTNMDPVDTATYYCAHRGRQYSYGYYYFDYWGQGTLVTVSS

SEQ ID NO: 718 - protein, 110 aa, Artificial Sequence
  Description of Artificial Sequence: Synthetic light chain variable region amino acid sequence
QSVLIQPASVSGSPGQSITISCTGTSSDVGGYNFVSWYQQHPGKAPKLMIYDVSNRPSGVSNRFSGSKSGNTASLTISGLQAEDEADYYCSSYTSSTLDVFGTGTKVTVL

SEQ ID NO: 719 - protein, 123 aa, Artificial Sequence
  Description of Artificial Sequence: Synthetic heavy chain variable region amino acid sequence
EVQLVESGGGLVQPGGSLRLSCAASGFTFSSYEMNWVRQAPGKGLEWVSYISSSGSTIYYADSVKGRFTISRDNAKNSLYLQMNSLRAEDTAVYYCARGGAVAGTRTGGFDIWGQGTTVTVSS

SEQ ID NO: 720 - protein, 108 aa, Artificial Sequence
  Description of Artificial Sequence: Synthetic light chain variable region amino acid sequence
SYELTQPPSVSVSPGQTARITCSGDALPKQYAYWYQQKPGQAPVLVIYKDSERPSGIPERFSGSSSGTTVTLTISGVQAEDEADYYCQSADSSGTYQVFGGGTKLTVL

SEQ ID NO: 721 - protein, 125 aa, Artificial Sequence
  Description of Artificial Sequence: Synthetic heavy chain variable region amino acid sequence
EVQLVESGGGLVKPGGSLRLSCAASGFIFSDYYMSWIRQAPGKGLEWVSNISGGSSFTNYADSVKGRFTISRDNAKNSLYLQMNSLRAEDTAVYYCARDLGYCSSNSCLDAFDIWGQGTTVTVSS

SEQ ID NO: 722 - protein, 111 aa, Artificial Sequence
  Description of Artificial Sequence: Synthetic light chain variable region amino acid sequence
QSVLTQPPSVSGAPGQRVTISCTGSSSNIGAGYDVHWYQQLPGTAPKLLIYGNTNRPSGVPDRFSGSRSGTSASLAITGLQAEDEADYYCQSYDSSLSGSLFGGGTKVTVL

SEQ ID NO: 723 - protein, 118 aa, Artificial Sequence
  Description of Artificial Sequence: Synthetic heavy chain variable region amino acid sequence
QVQLVQSGAEVKKPGESLKISCKGSGYSFTSYWIGWVRQMPGKGLEWMGIIYPGDSDTRYSPSFQGQVTISADKSISTAYLQWSSLKASDTAMFYCVMGSYSYYFDYWGQGTLVTVSS

SEQ ID NO: 724 - protein, 110 aa, Artificial Sequence
  Description of Artificial Sequence: Synthetic light chain variable region amino acid sequence
NFMLTQPHSVSESPGKTVTISCTRSSGSIASNYVQWYQQRPGSAPTTVIYEDNLRPSGVPDRFSGSIDSSSNSASLTISGLKTEDEADYYCQSYDSSNQVFGGGTKLTVL

SEQ ID NO: 725 - protein, 121 aa, Artificial Sequence
  Description of Artificial Sequence: Synthetic heavy chain variable region amino acid sequence
EVQLVESGGGLVKPGGSLRLSCAASGFTFSSYSMNWVRQAPGKGLEWVSSISSSSSYIYYADSVKGRFTISRDNAKNSLYLQMNSLRAEDTAVYYCARVGYSSSSGAFDYWGQGTLVTVSS

SEQ ID NO: 726 - protein, 111 aa, Artificial Sequence; identical to SEQ ID NO: 176
  Description of Artificial Sequence: Synthetic light chain variable region amino acid sequence

SEQ ID NO: 727 - protein, 127 aa, Artificial Sequence
  Description of Artificial Sequence: Synthetic heavy chain variable region amino acid sequence
QVQLVQSGGGVVQPGRSLRLSCAASGFTFSSYGMHWVRQAPGKGLEWVAVIWYDGSNKYYADSVKGRFTISRDNSKNTLYLQMNSLRAEDTAVYYCARTAYGSGSYPIYYYYYMDVWGKGTTVTVSS

SEQ ID NO: 728 - protein, 106 aa, Artificial Sequence
  Description of Artificial Sequence: Synthetic light chain variable region amino acid sequence
SYELTQPPSVSVSPGQTASITCSGDKLGDKYACWYQQKPGQSPVLVIYQDSKRPSGIPERFSGSNSGNTATLTISGTQAMDEADYYCQAWDSSTVVFGGGTKLTVL

SEQ ID NO: 729 - protein, 124 aa, Artificial Sequence
  Description of Artificial Sequence: Synthetic heavy chain variable region amino acid sequence
EVQLLESGPGLVKPSETLSLTCTVSGGSISSYYWSWIRQPPGKGLEWIGYIYYSGSTNYNPSLKSRVTISVDTSKNQFSLKLSSVTAADTAVYYCARILGHCSGGSCYRIIDYWGQGTLVTVSS

SEQ ID NO: 730 - protein, 106 aa, Artificial Sequence
  Description of Artificial Sequence: Synthetic light chain variable region amino acid sequence
QPVLTQPPSVSVSPGQTASITCSGDKLGDKYACWYQQKPGQSPVLVIYQDSKRPSGIPERFSGSNSGNTATLTISGTQAMDEADYYCQAWDSSTGVFGGGTKLTVL

SEQ ID NO: 731 - protein, 121 aa, Artificial Sequence
  Description of Artificial Sequence: Synthetic heavy chain variable region amino acid sequence
EVQLVESGGGLVKPGGSLRLSCAASGFTFSSYSMNWVRQAPGKGLEWVSSISSSSSYIYYADSVKGRFTISRDNAKNSLYLQMNSLRAEDTAVYYCAREGRDGYNYYFDYWGQGTLVTVSS

SEQ ID NO: 732 - protein, 111 aa, Artificial Sequence
  Description of Artificial Sequence: Synthetic light chain variable region amino acid sequence
QSVLTQPPSVSGAPGQRVTISCTGSSSNIGAGYDVHWYQQLPGTAPKLLIYGNSNRPSGVPDRFSGSKSGTSASLAITGLQAEDEADYYCQSYDSSLSGSVFGGGTKLTVL

SEQ ID NO: 733 - protein, 122 aa, Artificial Sequence
  Description of Artificial Sequence: Synthetic heavy chain variable region amino acid sequence
EVQLLESGGGLVKPGGSLRLSCAASGFTFSSYSMNWVRQAPGKGLEWVSSISSSSSYIYYADSVKGRFTISRDNAKNSLYLQMNSLRAEDTAVYYCARVRGGYSYGYGMDVWGQGTTVTVSS

SEQ ID NO: 734 - protein, 111 aa, Artificial Sequence
  Description of Artificial Sequence: Synthetic light chain variable region amino acid sequence
QSVVTQPPSVSGAPGQRVTISCTGSSSNIGAGFDVHWYQQLPGTAPKLLIYGNSNRPSGVPDQFSGSKSGTSASLAITGLQAEDEADYYCQSYDSSLSGVVFGGGTKLTVL

SEQ ID NO: 735 - protein, 128 aa, Artificial Sequence
  Description of Artificial Sequence: Synthetic heavy chain variable region amino acid sequence
QVQLVQSGAEVKKPGASVKVSCKASGYTFTSYGISWVRQAPGQGLEWMGWISAYNGNTNYAQKLQGRVTMTTDTSTSTAYMELRSLRSDDTAVYYCARVTARTFGGIRKGYYYGMDVWGQGTTVTVSS

SEQ ID NO: 736 - protein, 106 aa, Artificial Sequence
  Description of Artificial Sequence: Synthetic light chain variable region amino acid sequence
SYELTQPPSVSVSPGQTASITCSGDKLGDKYACWYQQKPGQSPVLVIYQDSKRPSGIPERFSGSNSGNTATLTISGTQVMDEADYYCQAWDSSTVVFGGGTKLTVL

SEQ ID NO: 737 - protein, 121 aa, Artificial Sequence
  Description of Artificial Sequence: Synthetic heavy chain variable region amino acid sequence
EVQLLESGGGLVLPGGSLRLSCAASGFTFSSYAMSWVRQAPGKGLEWVSAISGSGIYTYYADSVKGRFTISRDNSKNTLYLQMSSLRAEDTAVYYCAKGSLGMAYSAFDIWGLGTTVTVSS

SEQ ID NO: 738 - protein, 108 aa, Artificial Sequence
  Description of Artificial Sequence: Synthetic light chain variable region amino acid sequence
DIQLTQSPGTLSLSSGERATLSCRASQSVSSNYLAWYQQKPGQPPRLLIYGASSRATGIPDRFSGSGSGTDFTLTISRLEPEDFAVYYCQQYGSSPLTFGGGTKVDIK

SEQ ID NO: 739 - protein, 124 aa, Artificial Sequence
  Description of Artificial Sequence: Synthetic heavy chain variable region amino acid sequence
QVQLVQSGGGLVKPGGSLRLSCAASGFTFSSYSMNWVRQAPGKGLEWVSSISSSSSYIYYADSVKGRFTISRDNAKNSLYLQMNSLRAEDTAVYYCAREGYSSSSGYYYYMDVWGKGTTVTVSS

SEQ ID NO: 740 - protein, 111 aa, Artificial Sequence
  Description of Artificial Sequence: Synthetic light chain variable region amino acid sequence
QSVLTQPPSVSGAPGQRVTISCTGSSSNIGAGYDVHWYQQLPGTAPKLLIYGNSNRPSGVPDRFSGSKSGTSASLAITGLQAEDEADYYCQSYDSSLSGSVFGTGTKVTVL

SEQ ID NO: 741 - protein, 130 aa, Artificial Sequence
  Description of Artificial Sequence: Synthetic heavy chain variable region amino acid sequence
EVQLVESGPGLVKPSETLSLTCTVSGGSISSSSYYWGWIRQPPGKGLEWIGSIYYSGSTYYNPSLKSRVTISVDTSKNQFSLKLSSVTAADTAVYYCARHVNPYYDSSGTPYYYYGMDVWGQGTTVTVSS

SEQ ID NO: 742 - protein, 106 aa, Artificial Sequence
  Description of Artificial Sequence: Synthetic light chain variable region amino acid sequence
SYELTQPPSVSVSPGQTASITCSGDKLGDKYACWYQQKPGQSPVLVIYQDSKRPSGIPERFSGSNSGNTATLTISGTQAMDEADYYCQAWDSGTVVFGGGTKLTVL

SEQ ID NO: 743 - protein, 117 aa, Artificial Sequence
  Description of Artificial Sequence: Synthetic heavy chain variable region amino acid sequence
QVQLVQSGAEVKKPGASVKVSCKASGYTFTGYYMHWVRQAPGQGLEWMGWINPNSGGTNYAQKFQGWVTMTRDTSISTAYMELSRLRSDDTAVYYCARGDPAANDYWGQGTLVTVSS

SEQ ID NO: 744 - protein, 110 aa, Artificial Sequence
  Description of Artificial Sequence: Synthetic light chain variable region amino acid sequence
QPVLTQPPSASGSPGQSVTISCTGTSSDVGGYNYVSWYQQHPGKAPKLMIYEVSKRPSGVPDRFSGSKSGNTASLTVSGLQAEDEADYYCSSYAGSNNVVFGGGTKLTVL

SEQ ID NO: 745 - protein, 122 aa, Artificial Sequence
  Description of Artificial Sequence: Synthetic heavy chain variable region amino acid sequence
QVQLVQSGAEVKKPGASVKVSCKASGYTFTSYDINWVRQATGQGLEWMGWMNPNSGNTGYAQKFQGRVTMTRNTSISTAYMELSSLRSEDTAVYYCARGLPGQWLEYYFDYWGQGTLVTVSS

SEQ ID NO: 746 - protein, 108 aa, Artificial Sequence
  Description of Artificial Sequence: Synthetic light chain variable region amino acid sequence
SYVLTQPPSVSVAPGKTARITCGGNNIGSKSVHWYQQKPGQAPVLVIYYDSDRPSGIPERFSGSNSGNTATLTISRVEAGDEADYYCQVWDSSSDHPVFGGGTKVTVL

SEQ ID NO: 747 - protein, 123 aa, Artificial Sequence
  Description of Artificial Sequence: Synthetic heavy chain variable region amino acid sequence
EVQLVESGGGLVQPGGSLRLSCAASGFSFSTYAMSWVRQAPGKGLEWVSAISGGGGSTYYADSVKGRFTISRDNSKNTLYLQVNSLRAEDTAVYYCARGGYCSSDSCYPFDFWGQGTLVTVSS

SEQ ID NO: 748 - protein, 108 aa, Artificial Sequence
  Description of Artificial Sequence: Synthetic light chain variable region amino acid sequence
QPVLTQPPSVSVSPGQTAMITCSGDALPKQYAYWYQQKPGQAPVLVIYKDSERPSGIPERFSGSSSGTTVTLTISGVQAEDEADYYCQSADNSGSYAVFGGGTQLTVL

SEQ ID NO: 749 - protein, 123 aa, Artificial Sequence
  Description of Artificial Sequence: Synthetic heavy chain variable region amino acid sequence
EVQLLESGGGLVQPGRSLRLSCAASGFTFDDYAMHWVRQAPGKGLEWVSGISWNSGSIGYADSVKGRFTISRDNAKNSLYLQMNSLRAEDTALYYCAKDGDSSSWRDSNFDYWGQGTLVTVSS

SEQ ID NO: 750 - protein, 111 aa, Artificial Sequence; identical to SEQ ID NO: 272
  Description of Artificial Sequence: Synthetic light chain variable region amino acid sequence

SEQ ID NO: 751 - protein, 129 aa, Artificial Sequence
  Description of Artificial Sequence: Synthetic heavy chain variable region amino acid sequence
EVQLLESGGGVVQPGRSLRLSCAASGFTFNSYTMHWVRQAPGKGLEWVAVISYDGSNKYYADSVKGRFTISRDNSKNTLYLQMNSLRAEDTAVYYCARGRPYDFWSGYYTDYYYYMDVWGKGTTVTVSS

SEQ ID NO: 752 - protein, 107 aa, Artificial Sequence
  Description of Artificial Sequence: Synthetic light chain variable region amino acid sequence
EIVLTQSPGTLSLSPGERATLSCRASQSVYSNYLAWYQQKPGQAPRLLIYGASSRATGIPDRFSGSGSGTDFTLTISRLEPEDFAVYYCQQCGSSWTFGQGTKVEIK

SEQ ID NO: 753 - protein, 123 aa, Artificial Sequence
  Description of Artificial Sequence: Synthetic heavy chain variable region amino acid sequence
EVQLVESGGGLVKPGGSLRLSCAASGFTFSSYSMNWVRQAPGKGLEWVSSISSSSSYIYYADSVKGRFTISRDNAKNSLYLQMNSLRAEDTAVYYCAREGYSSSSGYYYMDVWGKGTTVTVSS

SEQ ID NO: 754 - protein, 111 aa, Artificial Sequence; identical to SEQ ID NO: 740
  Description of Artificial Sequence: Synthetic light chain variable region amino acid sequence

SEQ ID NO: 755 - protein, 121 aa, Artificial Sequence
  Description of Artificial Sequence: Synthetic heavy chain variable region amino acid sequence
QVQLVQSGAEVKKPGASVKVSCKASGYTFTSYDINWVRQATGQGLEWMGWMNPNSGNTGYAQKFQGRVTMTRNTSISTAYMELSSLRSEDTAVYYCARGIPGYYYYGMDVWGQGTTVTVSS

SEQ ID NO: 756 - protein, 106 aa, Artificial Sequence
  Description of Artificial Sequence: Synthetic light chain variable region amino acid sequence
SYELTQPPSVSVSPGQTASITCSGDKLGDKYACWYQQKPGQSPVLVIYQDSKRPSGIPERFSGSNSGNTATLTISGTQAMDEADYYCQAWDSSTYVFGTGTKVTVL

SEQ ID NO: 757 - protein, 123 aa, Artificial Sequence
  Description of Artificial Sequence: Synthetic heavy chain variable region amino acid sequence
EVQLVESGGGLVKPGGSLRLSCAASGFTFSSYSMNWVRQAPGKGLEWVSSISSSSSYIYYADSVKGRFTISRDNAKNSLYLQMNSLRAEDTAVYYCARDSMALLYSNYWFDPWGQGTLVTVSS

SEQ ID NO: 758 - protein, 111 aa, Artificial Sequence
  Description of Artificial Sequence: Synthetic light chain variable region amino acid sequence
QSVVTQPPSVSGAPGQRVTISCTGSSSNIGAGYDVHWYQQLPGTAPKLLIYGNSNRPSGVPDRFSGSKSGTSASLAITGLQAEDEADYYCQSYDSSLSGSVFGGGTKLTVL

SEQ ID NO: 759 - protein, 118 aa, Artificial Sequence
  Description of Artificial Sequence: Synthetic heavy chain variable region amino acid sequence
QVQLVQSGAEVKKPGASVKVSCKASGYTFTGYYMHWVRQAPGQGLEWMGWINPNSGGTNYAQKFQGRVTMTRDTSISTAYMELSRLRSDDTAVYYCARGGTGVEFDYWGQGTLVTVSS

SEQ ID NO: 760 - protein, 110 aa, Artificial Sequence
  Description of Artificial Sequence: Synthetic light chain variable region amino acid sequence
QPVLTQPASVSGSPGQSITISCTGTSSDVGGYNYVSWYQQHPGKAPKLMIYDVSNRPSGVSNRFSGSKSGNTASLTISGLQAEDEADYYCSSYTSSSTLVFGGGTQLTVL

SEQ ID NO: 761 - protein, 120 aa, Artificial Sequence
  Description of Artificial Sequence: Synthetic heavy chain variable region amino acid sequence
EVQLLESGGGLVKPGGSLRLSCAASGFTFSSYSMNWVRQAPGKGLEWVSSISSSSSYIYYADSVKGRFTISRDNAKNSLYLQMNSLRAEDTAVYYCARESGSGWYYFDYWGQGTLVTVSS

SEQ ID NO: 762 - protein, 110 aa, Artificial Sequence
  Description of Artificial Sequence: Synthetic light chain variable region amino acid sequence
QSVLTQPPSVSGAPGQRVTISCTGSSSNIGAGYDVHWYQQLPGTAPKLLIYGNSNRPSGVPDRFSGSKSGTSASLAITGLQAEDEADYYCQSYDGSLSGVFGGGTKVTVL

SEQ ID NO: 763 - protein, 119 aa, Artificial Sequence
  Description of Artificial Sequence: Synthetic heavy chain variable region amino acid sequence
QVQLVQSGAEVKKPGSSVKVSCKASGGTFSSYTISWVRQAPGQGLEWMGRIIPILGIANYAQKFQGRVTITADKSTSTAYMELSSLRSEDTAVYYCARDPPYLRAFDIWGQGTTVTVSS

SEQ ID NO: 764 - protein, 108 aa, Artificial Sequence
  Description of Artificial Sequence: Synthetic light chain variable region amino acid sequence
ETTLTQSPSSLSASVGDRVTITCRASQSISSYLNWYQQKPGKAPKLLIYAASSLQSGVPSRFSGSGSGTDFTLTISSLQPEDFATYYCQQSYSTPLLTFGGGTKVEIK

SEQ ID NO: 765 - protein, 121 aa, Artificial Sequence
  Description of Artificial Sequence: Synthetic heavy chain variable region amino acid sequence
EVQLVESGGGLVQPGRSLRLSCAASGFTFDDYAMHWVRQAPGKGLEWVSGISWNSGSIGYADSVKGRFTISRDNAKNSLYLQMNSLRAEDTALYYCAKDKDNWNYDAFDIWGQGTMVTVSS

SEQ ID NO: 766 - protein, 110 aa, Artificial Sequence
  Description of Artificial Sequence: Synthetic light chain variable region amino acid sequence
SYELTQPPSASGTPGQRVTISCSGSSSNIGSNTVNWYQQLPGTAPKLLIYSNNQRPSGVPDRFSGSKSGTSASLAISGLQSEDEADYYCAAWDDSLNGPVFGGGTKLTVL

SEQ ID NO: 767 - protein, 122 aa, Artificial Sequence
  Description of Artificial Sequence: Synthetic heavy chain variable region amino acid sequence
QVQLVESGGGLVKPGGSLRLSCAASGFTFSSYSMNWVRQAPGKGLEWVSSISSSSSYIYYADSVKGRFTISRDNAKNSLYLQMNSLRAEDTAVYYCARDSGLGSRGDAFDIWGQGTMVTVSS

SEQ ID NO: 768 - protein, 111 aa, Artificial Sequence
  Description of Artificial Sequence: Synthetic light chain variable region amino acid sequence
QSVLTQPPSVSGAPGQRVTISCTGSSSNIGAGYDVHWYQQLPGTAPKLLIYGNSNRPSGVPDRFSGSKSGTSASLAITGLQAEDEADYYCQSYDSSLSGYVFGTGTKVTVL

SEQ ID NO: 769 - protein, 122 aa, Artificial Sequence
  Description of Artificial Sequence: Synthetic heavy chain variable region amino acid sequence
EVQLLESGGGLVKPGGSLRLSCAASGFTFSSYSMNWVRQAPGKGLEWVSSISSSSSYIYYADSVKGRFTISRDNAKNSLYLQMNSLRAEDTAVYYCAREGDYYGSGRPFDYWGQGTLVTVSS

SEQ ID NO: 770 - protein, 110 aa, Artificial Sequence
  Description of Artificial Sequence: Synthetic light chain variable region amino acid sequence
QSVVTQPPSVSGAPGQRVTISCTGSSSNIGAGYDVHWYQQLPGTAPKLLIYGNSNRPSGVPDRFSGSKSGTSASLAITGLQAEDEADYYCQSYDSSLSVVFGGGTKLTVL

SEQ ID NO: 771 - protein, 121 aa, Artificial Sequence
  Description of Artificial Sequence: Synthetic heavy chain variable region amino acid sequence
QVQLQESGPGLVKPSETLSLTCTVSGGSISSYYWSWIRQPPGKGLEWIGYIYYSGSTNYNPSLKSRVTISVDTSKNQFSLKLSSVTAADTAVYYCAISLYGDYRTDAFDIWGQGTTVTVSS

SEQ ID NO: 772 - protein, 106 aa, Artificial Sequence
  Description of Artificial Sequence: Synthetic light chain variable region amino acid sequence
EIVLTQSPSSFSASTGDRVTITCRASQGISSYLAWYQQKPGKAPKLLIYAASTLQSGVPSRFSGSGSGTDFTLTISCLQSEDFATYYCQQYYSYPLFGGGTKVEIK

SEQ ID NO: 773 - protein, 120 aa, Artificial Sequence
  Description of Artificial Sequence: Synthetic heavy chain variable region amino acid sequence
QVQLVQSGAEVKKPGASVKVSCKASGYTFTSYDINWVRQATGQGLEWMGWMNPNSGNTGYAQKFQGRVTMTRNTSISTAYMELSSLRSEDTAVYYCSSVGGYYYYGMDVWGQGTTVTVSS

SEQ ID NO: 774 - protein, 112 aa, Artificial Sequence
  Description of Artificial Sequence: Synthetic light chain variable region amino acid sequence
EIVMTQSPLSLPVTPGEPASISCRSSQSLLHSNGYNYLDWYLQKPGQSPQLLIYLGSNRASGVPDRFSGSGSGTDFTLKISRVEAEDVGVYYCMQALQTLYTFGQGTKVEIK

SEQ ID NO: 775 - protein, 120 aa, Artificial Sequence
  Description of Artificial Sequence: Synthetic heavy chain variable region amino acid sequence
EVQLVESGGGLVKPGGSLRLSCAASGFTFSSYSMNWVRQAPGKGLEWVSSISSSSSYIYYADSVKGRFTISRDNAKNSLYLQMNSLRAEDTAVYYCARDRGYGSGALDYWGQGTLVTVSS

SEQ ID NO: 776 - protein, 110 aa, Artificial Sequence
  Description of Artificial Sequence: Synthetic light chain variable region amino acid sequence
QPVLTQPASVSGSPGQSITISCTGTSSDVGGYNYVSWYQQHPGKAPKLMIYDVSNRPSGVSNRFSGSKSGNTASLTISGLQAEDEADYYCSSYTSSSTVVFGGGTKLTVL

SEQ ID NO: 777 - protein, 122 aa, Artificial Sequence
  Description of Artificial Sequence: Synthetic heavy chain variable region amino acid sequence
EVQLVESGGGLVQPGGSLRLSCAASGFTVSSNYMSWVRQAPGKGLEWVSVIYSDGSTYYADSVKGRFTISRHNSKNTLYLQMNSLRAEDTAVYYCARCSTYGDYIDWYFDLWGRGTLVTVSS

SEQ ID NO: 778 - protein, 107 aa, Artificial Sequence
  Description of Artificial Sequence: Synthetic light chain variable region amino acid sequence
ETTLTQSPATLSVSPGERATLSCRASQSVSSNLAWYQQKPGQAPRLLIYGASTRATGIPARFSGSGSGTEFTLTISSLQSEDFAVYYCQQYNNWPLSFGGGTKLEIK

SEQ ID NO: 779 - protein, 121 aa, Artificial Sequence
  Description of Artificial Sequence: Synthetic heavy chain variable region amino acid sequence
EVQLVESGGGLVKPGGSLRLACAASGFSFRSYRMNWVRQAPGKGLEWVSSISSSSSYIDYADSVKGRFTISRDNAKNTVYLQVNSLRAEDTAVYYCARDGRTIFGVVIDYWGQGTLVTVSS

SEQ ID NO: 780 - protein, 110 aa, Artificial Sequence
  Description of Artificial Sequence: Synthetic light chain variable region amino acid sequence
QSVLTQPPSVSGAPGQRVTISCTGSSSNIGAGYDVHWYQQLPGTAPKLLIYGNNNRPSGVPDRFSGSKSGTSASLVITGLQAEDEADYYCQSYDSSLSVVFGGGTKLTVL

SEQ ID NO: 781 - protein, 124 aa, Artificial Sequence
  Description of Artificial Sequence: Synthetic heavy chain variable region amino acid sequence
EVQLLESGGGLVKPGGSLRLSCAASGFTFSSYSMNWVRQAPGKGLEWVSSISSSSSYIYYADSVKGRFTISRDNAKNSLYLQMNSLRAEDTAVYYCARGFHYYGSGSHDAFDIWGQGTMVTVSS

SEQ ID NO: 782 - protein, 110 aa, Artificial Sequence
  Description of Artificial Sequence: Synthetic light chain variable region amino acid sequence
QPVLTQPPSVSGAPGQRVTISCTGSSSNIGAGYDVHWYQQLPGTAPKLLIYGNSNRPSGVPDRFSGSKSGTSASLAITGLQAEDEADYYCQSYDSSLSGVFGGGTKLTVL

SEQ ID NO: 783 - protein, 121 aa, Artificial Sequence
  Description of Artificial Sequence: Synthetic heavy chain variable region amino acid sequence
QVQLVQSGAEVKKPGSSVKVSCKASGGTFSSYAISWVRQAPGQGLEWMGGIIPIFGTANYAQKFQGRVTITADESTSTAYMELSSLRSEDTAVYYCARGGSMVRGLGFDPWGQGTLVTVSS

SEQ ID NO: 784 - protein, 112 aa, Artificial Sequence
  Description of Artificial Sequence: Synthetic light chain variable region amino acid sequence
DIQLTQSPLSLPVTPGEPASISCRSSQSLLHSNGYNYLDWYLQKPGQSPQLLIYLGSNRASGVPDRFSGSGSGTDFTLKISRVEAEDVGVYYCMQALQTPLTFGGGTKLEIK

SEQ ID NO: 785 - protein, 122 aa, Artificial Sequence
  Description of Artificial Sequence: Synthetic heavy chain variable region amino acid sequence
QVQLVESGGGLVKPGGSLRLSCAASGFTFSSYSMNWVRQAPGKGLEWVSSISSSSSYIYYADSVKGRFTISRDNAKNSLYLQMNSLRAEDTAVYYCARVPSDFWSGYYNDYWGQGTLVTVSS

SEQ ID NO: 786 - protein, 112 aa, Artificial Sequence
  Description of Artificial Sequence: Synthetic light chain variable region amino acid sequence
QSVLTQPPSVSGAPGQRVTISCTGSSSNIGAGYDVHWYQQLPGTAPKLLIYGNSNRPSGVPDRFSGSKSGTSASLAITGLQAEDEADYYCQSYDSSLSGSWVFGGGTKLTVL

SEQ ID NO: 787 - protein, 123 aa, Artificial Sequence
  Description of Artificial Sequence: Synthetic heavy chain variable region amino acid sequence
EVQLVESGGGLVKPGGSLRLSCAASGFTFSSYSMNWVRQAPGKGLEWVSSISASSSYIFYSDLVKGRFTISRDNAKNSLYLQMNSLRAEDTAVYYCARAGYYYGSGSYYVDYWGQGTLVTVSS

SEQ ID NO: 788 - protein, 111 aa, Artificial Sequence
  Description of Artificial Sequence: Synthetic light chain variable region amino acid sequence
QSVLTQPPSVSGAPGQRVAISCTGSSSNIGAGYDVHWYQQLPGTAPKLLIYGNSNRPSGVPDRFSGSKSGTSASLAITGLQAEDEADYYCQSYGSSLSGWVFGGGTKLTVL

SEQ ID NO: 789 - protein, 124 aa, Artificial Sequence
  Description of Artificial Sequence: Synthetic heavy chain variable region amino acid sequence
QVQLVESGGGLVKPGGSLRLSCAASGFTFSSYSMNWVRQAPGKGLEWVSSISSSSSYIYYADSVKGRFTISRDNAKNSLYLQMNSLRAEDTAVYYCARALTYYYDSSGHGADYWGQGTLVTVSS

SEQ ID NO: 790 - protein, 110 aa, Artificial Sequence; identical to SEQ ID NO: 770
  Description of Artificial Sequence: Synthetic light chain variable region amino acid sequence

SEQ ID NO: 791 - protein, 124 aa, Artificial Sequence
  Description of Artificial Sequence: Synthetic heavy chain variable region amino acid sequence
QVQLVQSGGGLVQPGGSLRLSCAASGFTFSSYAMSWVRQAPGKGLEWVSTISGSGGSTYYADSVKGRFTISRDNSKNTLYLQMNSLRAEDTAVYYCATWKRWGSGYYYSYMDVWGKGTTVTVSS

SEQ ID NO: 792 - protein, 107 aa, Artificial Sequence
  Description of Artificial Sequence: Synthetic light chain variable region amino acid sequence
DIQLTQSPSTLSASVGDRVTITCRASQSISSWLAWYQQKPGKAPKLLIYDAFSLESGVPSRFSGSGSGTEFTLTISSLQPDDFATYYCQQYNSYSVTFGGGTKVEIK

SEQ ID NO: 793 - protein, 120 aa, Artificial Sequence
  Description of Artificial Sequence: Synthetic heavy chain variable region amino acid sequence
EVQLVESGGGLVKPGGSLRLSCAASGFPFSTSSMNWVRQAPGKGLEWVSSISSSSSYIDYADSVKGRFTISRDNAKNSLYLQMNSLRAGDTAVYYCARVPRSDWYYFDYWGQGTLVTVSS

SEQ ID NO: 794 - protein, 111 aa, Artificial Sequence
  Description of Artificial Sequence: Synthetic light chain variable region amino acid sequence
QSVVTQPPSVSGAPGQRVTISCTGSSSNIGAGYDVHWYQQLPGTAPKFLIYDNKYRPSGVPDRFSGSKSGTSASLAITGLQAEDEADYYCQSYDSSLSGYVFGTGTKLTVL

SEQ ID NO: 795 - protein, 123 aa, Artificial Sequence
  Description of Artificial Sequence: Synthetic heavy chain variable region amino acid sequence
EVQLLESGGGLVQPGRSLRLSCAASGFTFDDYAMHWVRQAPGKGLEWVSGISWNSGSIGYADSVKGRFTISRDNAKNSLYLQMNSLRAEDTALYYCAKDLRGGTYYYYGMDVWGQGTTVTVSS

SEQ ID NO: 796 - protein, 107 aa, Artificial Sequence
  Description of Artificial Sequence: Synthetic light chain variable region amino acid sequence
DIRVTQSPSSLSASVGDRVTITCRASQSISSYLNWYQQKPGKAPKLLIYAASSLQSGVPSRFSGSGSGTDFTLTISSLQPEDFATYYCQQSYSTPPTFGGGTKVEIK

SEQ ID NO: 797 - protein, 127 aa, Artificial Sequence
  Description of Artificial Sequence: Synthetic heavy chain variable region amino acid sequence
QVQLQESGPGLVKPSETLSLTCTVSGGSISSYYWSWIRQPPGKGLEWIGYIYYSGSTNYNPSLKSRVTISVDTSKNQFSLKLSSVTAADTAVYYCARAIYYYDSSGYYYVGDAFDIWGQGTTVTVSS

SEQ ID NO: 798 - protein, 110 aa, Artificial Sequence
  Description of Artificial Sequence: Synthetic light chain variable region amino acid sequence
QSVLTQPPSVSAAPGQKVTISCSGSSSNIGNNYVSWYQQLPGTAPKLLIYENNKRPSGIPDRFSGSKSGTSATLGITGLQTGDEADYYCGTWDSSLSAGVFGGGTKLTVL

SEQ ID NO: 799 - protein, 127 aa, Artificial Sequence
  Description of Artificial Sequence: Synthetic heavy chain variable region amino acid sequence
EVQLLESGGGLVKPGGSLRLSCAASGFTFSSYSMNWVRQAPGKGLEWVSSISSSSSYIYYADSVKGRFTISRDNAKNSLYLQMNSLRAEDTAVYYCARQGVGTVTTWNYYYYYMDVWGKGTTVTVSS

SEQ ID NO: 800 - protein, 110 aa, Artificial Sequence
  Description of Artificial Sequence: Synthetic light chain variable region amino acid sequence
QSVVTQPPSVSGAPGQRVTISCTGSSSNIGAGYDVHWYQQLPGTAPKLLIYGNSNRPSGVPDRFSGSKSGTSASLAITGLQAEDEADYYCQSYDSSLSWVFGGGTKLTVL

SEQ ID NO: 801 - protein, 122 aa, Artificial Sequence
  Description of Artificial Sequence: Synthetic heavy chain variable region amino acid sequence
EVQLVESGGGLVKPGGSLRLSCAASGFTFSSYSMNWVRQAPGKGLEWVSSISSSSSYIYYADSVKGRFTISRDNAKNSLYLQMNSLRAEDTAVYYCARVLVATAYGNAFDIWGQGTMVTVSS

SEQ ID NO: 802 - protein, 110 aa, Artificial Sequence
  Description of Artificial Sequence: Synthetic light chain variable region amino acid sequence
QSVLTQPPSVSGAPGQRVTISCTGSSSNIGAGYDVHWYQQLPGTAPKLLIYGNSNRPSGVPDRFSGSKSGTSASLAITGLQAEDEADYYCQSYDSSLTVVFGGGTKLTVL

SEQ ID NO: 803 - protein, 121 aa, Artificial Sequence
  Description of Artificial Sequence: Synthetic heavy chain variable region amino acid sequence
EVQLLESGGGLVKPGGSLRLSCAASGFTFSSYSMNWVRQAPGKGLEWVSSISSSSSYIYYADSVKGRFTISRDNAKNSLYLQMNSLRAEDTAVYYCARDQVYSYGYYFDYWGQGTLVTVSS

SEQ ID NO: 804 - protein, 113 aa, Artificial Sequence
  Description of Artificial Sequence: Synthetic light chain variable region amino acid sequence
QSVLAQPPSVSGAPGQRVTISCTGSSSNIGAGYDVHWYQQLPGTAPKLLIYGNSNRPSGVPDRFSGSKSGTSASLAITGLQAEDEADYYCQSYDSSLSGSHVVFGGGTKLTVL

SEQ ID NO: 805 - protein, 129 aa, Artificial Sequence
  Description of Artificial Sequence: Synthetic heavy chain variable region amino acid sequence
QVQLVQSGAEVKKPGASVKVSCKASGYTFTSYAMHWVRQAPGQRLEWMGWINAGNGNTKYSQKFQGRVTITRDTSASTAYMELSSLRSEDTAVYYCARDGFPTNYDFWSGYSDDAFDIWGQGTMVTVSS

SEQ ID NO: 806 - protein, 108 aa, Artificial Sequence
  Description of Artificial Sequence: Synthetic light chain variable region amino acid sequence
DIVMTQSPATLSVSPGERATLSCRASQSVSSNLAWYQQKPGQAPRLLIYGASTRATGIPARFSGSGSGTEFTLTISSLQSEDFAVYYCQQYNNWPPLTFGQGTKVDIK

SEQ ID NO: 807 - protein, 122 aa, Artificial Sequence
  Description of Artificial Sequence: Synthetic heavy chain variable region amino acid sequence
QVQLVQSGGGLVKPGGSLRLSCAASGFTFSSYSMNWVRQAPGKGLEWVSSISSSSSYIYYADSVKGRFTISRDNAKNSLYLQMNSLRAEDTAVYYCARVPPHDYGGYYFDYWGQGTLVTVSS

SEQ ID NO: 808 - protein, 110 aa, Artificial Sequence
  Description of Artificial Sequence: Synthetic light chain variable region amino acid sequence
QSVVTQPPSVSGAPGQRVTISCTGSSSNIGAGYDVHWYQQLPGTAPKLLIYRNSNRPSGVPDRFSGSKSGTSASLAIIGLQAEDEADYYCQSYDSSLSVVFGGGTKLTVL

SEQ ID NO: 809 - protein, 119 aa, Artificial Sequence
  Description of Artificial Sequence: Synthetic heavy chain variable region amino acid sequence
EVQLVESGPGLVKPSQTLSLTCTVSGGSISSGDYYWSWIRQPPGKGLEWIGYIYYSGSTYYNPSLKSRVTISVDTSKNQFSLKLSSVTAADTAVYYCARESIVGAVDYWGQGTLVTVSS

SEQ ID NO: 810 - protein, 113 aa, Artificial Sequence
  Description of Artificial Sequence: Synthetic light chain variable region amino acid sequence
DIQMTQSPDSLAVSLGERATINCKSSQSVLYSSNNKNYLAWYQQKPGQPPKLLIYWASTRESGVPDRFSGSGSGTDFTLTISSLQAEDVAVYYCQQYYSTPHTFGQGTKLEIK

SEQ ID NO: 811 - protein, 124 aa, Artificial Sequence
  Description of Artificial Sequence: Synthetic heavy chain variable region amino acid sequence
EVQLVESGGGLVKPGGSLRLSCAASGFTFSSYSMNWVRQAPGKGLEWVSSISSSSSYIYYADSVKGRFTISRDNAKNSLYLQMNSLRAEDTAVYYCARDYCSGGSCYLAAFDIWGQGTTVTVSS

SEQ ID NO: 812 - protein, 111 aa, Artificial Sequence
  Description of Artificial Sequence: Synthetic light chain variable region amino acid sequence
QPVLTQPASVSGSPGQSITISCTGTSSDVGGYNYVSWYQQHPGKAPKLMIYEVSNRPSGVSNRFSGSKSGNTASLTISGLQAEDEADYYCSSYTSSSTPVVFGGGTKLTVL

SEQ ID NO: 813 - protein, 118 aa, Artificial Sequence
  Description of Artificial Sequence: Synthetic heavy chain variable region amino acid sequence
EVQLLESGGGLVKPGGSLRLSCAASGFTFSSYSMNWVRQAPGKGLEWVSSISSSSSYIYYADSVKGRFTISRDNAKNSLYLQMNSLRAEDTAVYYCARDDGILWLDYWGQGTLVTVSS

SEQ ID NO: 814 - protein, 110 aa, Artificial Sequence
  Description of Artificial Sequence: Synthetic light chain variable region amino acid sequence
QPGLTQPPSASGTPGQRVTISCSGSSSNIGSNYVYWYQQLPGTAPKLLIYRNNQRPSGVPDRFSGSKSGTSASLAISGLRSEDEADYYCAAWDDSLSGQVFGGGTKLTVL

SEQ ID NO: 815 - protein, 119 aa, Artificial Sequence
  Description of Artificial Sequence: Synthetic heavy chain variable region amino acid sequence
EVQLVESGGGLVKPGGSLRLSCAASGFTFSSYSMNWVRQAPGKGLEWVSSISSSSNYIYYADSVKGRFTISRDNAKNSLYLQMNSLRAEDTAVYYCARDRIAAYTFDYWGQGTLVTVSS

SEQ ID NO: 816 - protein, 110 aa, Artificial Sequence
  Description of Artificial Sequence: Synthetic light chain variable region amino acid sequence
QSVVTQPPSVSGAPGQRVTISCTGSSSNIGAGYDVHWYQQLPGTAPKLLIYGNSNRPSGVPDRFSGSKSGTSASLAITGLQAEDEADYYCQSYDSSLPYVFGTGTKVTVL

SEQ ID NO: 817 - protein, 120 aa, Artificial Sequence
  Description of Artificial Sequence: Synthetic heavy chain variable region amino acid sequence
EVQLVESGGGLVKPGGSLRLSCAASGFTFSSYSMNWVRQAPGKGLEWVSSISSSSSYIYYADSVKGRFTISRDNAKNSLYLQMNSLRAEDTAVYYCARDTVVAGIYFDYWGQGTLVTVSS

SEQ ID NO: 818 - protein, 111 aa, Artificial Sequence; identical to SEQ ID NO: 272
  Description of Artificial Sequence: Synthetic light chain variable region amino acid sequence

SEQ ID NO: 819 - protein, 128 aa, Artificial Sequence
  Description of Artificial Sequence: Synthetic heavy chain variable region amino acid sequence
QVQLVQSGGVVVQPGGSLRLSCAASGFTFDDYTMHWVRQAPGKGLEWVSLIGWDGGSTYYADSVKGRFTISRDNSKYSLYLQMNSLRTEDTALYYCAKDLGSSSGYFLGRDYYGMDVWGQGTTVTVSS

SEQ ID NO: 820 - protein, 106 aa, Artificial Sequence
  Description of Artificial Sequence: Synthetic light chain variable region amino acid sequence
DIQLTQSPSSLSASVGDRVTITCQASQDISNYLNWYQQKPGKAPKLLIYDASNLETGVPSRFSGSGSGTDFTFTISSLQPEDIATYYCQQYNNLPTFGGGTKLEIK

SEQ ID NO: 821 - protein, 122 aa, Artificial Sequence
  Description of Artificial Sequence: Synthetic heavy chain variable region amino acid sequence
QVQLVQSGGGLVKPGGSLRLSCAASGFTFSSYSMNWVRQAPGKGLEWVSSISSSSSYIYYADSVKGRFTISRDNAKNSLYLQMNSLRAEDTAVYYCAREDYGDYYYYYMDVWGKGTTVTVSS

SEQ ID NO: 822 - protein, 111 aa, Artificial Sequence
  Description of Artificial Sequence: Synthetic light chain variable region amino acid sequence
QPVLTQPPSVSGAPGQRVTISCTGSSSNIGAGYDVHWYQQLPGTAPKLLIYGNSNRPSGVPDRFSGSKSGTSASLAITGLQAEDEADYYCQSYDSSLSGYVFGTGTKVTVL

SEQ ID NO: 823 - protein, 117 aa, Artificial Sequence
  Description of Artificial Sequence: Synthetic heavy chain variable region amino acid sequence
QVQLVQSGAEVKKPGASVKVSCKASGYTFTGYYMHWVRQAPGQGLEWMGWINPNSGGTNYAQKFQGRVTMTRDTSISTAYMELSRLRSDDTAVYYCARAYELELDYWGQGTLVTVSS

SEQ ID NO: 824 - protein, 110 aa, Artificial Sequence
  Description of Artificial Sequence: Synthetic light chain variable region amino acid sequence
QSVLIQPPSASGSPGQSVTISCTGTSSDVGGYNYVSWYQQHPGKAPKLMIYEVSKRPSGVPDRFSGSKSGNTASLTVSGLQAEDEADYYCSSYAGSNNVVFGGGTKLTVL

SEQ ID NO: 825 - protein, 117 aa, Artificial Sequence
  Description of Artificial Sequence: Synthetic heavy chain variable region amino acid sequence
QVQLVESGAEVKKPGASVKVSCKASGYTFTSYAIHWVRQAPGQRLEWMGWINAGNGNTKYSQKFQGRVTITRDTSASTAYMELSSLRSEDTAVYYCASEESGYFDYWGQGTLVTVSS

SEQ ID NO: 826 - protein, 106 aa, Artificial Sequence
  Description of Artificial Sequence: Synthetic light chain variable region amino acid sequence
SYELMQPPSVPVSPGQTASITCSGDKLGDKYACWYQQKPGQSPVLVIYQDRKRPSGIPERFSGSNSGNTATLTISGTQAMDEADYYCQAWDSSTVVFGGGTKVTVL

SEQ ID NO: 827 - protein, 121 aa, Artificial Sequence
  Description of Artificial Sequence: Synthetic heavy chain variable region amino acid sequence
EVQLVESGGGLVKPGGSLRLSCAASGFTFSSYSMNWVRQAPGKGLEWVSSISSSSSYIYYADSVKGRFTISRDNAKNSLYLQMNSLRAEDTAVYYCARDRRFGELFYFDYWGQGTLVTVSS

SEQ ID NO: 828 - protein, 112 aa, Artificial Sequence
  Description of Artificial Sequence: Synthetic light chain variable region amino acid sequence
QSVLTQPPSVSGAPGQRVTISCTGSSSNIGAGYDVHWYQQLPGTAPKLLIYGNSNRPSGVPDRFSGSKSGTSASLAITGLQAEDEADYYCQSYDSSLSGNWVFGGGTKLTVL

SEQ ID NO: 829 - protein, 123 aa, Artificial Sequence
  Description of Artificial Sequence: Synthetic heavy chain variable region amino acid sequence
EVQLVESGGGLVKPGGSLRLSCAASGFTFSSYSMNWVRQAPGKGLEWVSSISSSSSYIYYADSVKGRFTISRDNAKNSLYLQMNSLRAEDTAVYYCARRYCTNGVCYDAFDIWGQGTMVTVSS

SEQ ID NO: 830 - protein, 110 aa, Artificial Sequence; identical to SEQ ID NO: 692
  Description of Artificial Sequence: Synthetic light chain variable region amino acid sequence

SEQ ID NO: 831 - protein, 124 aa, Artificial Sequence
  Description of Artificial Sequence: Synthetic heavy chain variable region amino acid sequence
QVQLVQSGAEVKKPGASVKVSCKASGYTFTSYGISWVRQAPGQGLEWMGWISAYNGNTNYAQKLQGRVTMTTDTSTSTAYMELRSLRSDDTAVYYCARAGIVVVPKYYYYMDVWGKGTTVTVSS

SEQ ID NO: 832 - protein, 109 aa, Artificial Sequence
  Description of Artificial Sequence: Synthetic light chain variable region amino acid sequence
DIVMTQSPGTLSLSPGERATLSCRASQSVSSSYLAWYQQKPGQAPRLLIYGASSRATGIPDRFSGSGSGTDFTLTISRLEPEDFAVYYCQQYGSSPMYTFGQGTKVEIK

SEQ ID NO: 833 - protein, 122 aa, Artificial Sequence
  Description of Artificial Sequence: Synthetic heavy chain variable region amino acid sequence
EVQLLESGGGLVKPGGSLRLSCAASGFTFSSYSMNWVRQAPGKGLEWVSSISSSSSYIYYADSVKGRFTISRDNAKNSLYLQMNSLRAEDTAVYYCAREGYYYGSGSYLDYWGQGTLVTVSS

SEQ ID NO: 834 - protein, 110 aa, Artificial Sequence; identical to SEQ ID NO: 770
  Description of Artificial Sequence: Synthetic light chain variable region amino acid sequence

SEQ ID NO: 835 - protein, 120 aa, Artificial Sequence
  Description of Artificial Sequence: Synthetic heavy chain variable region amino acid sequence
EVQLLESGGGLVKPGGSLRLSCAASGFTFSSYSMNWVRQAPGKGLEWVSSISSSSSYIYYADSVKGRFTISRDNAKNSLYLQMNSLRAEDTAVYYCARGGYSYGYSFDYWGQGTLVTVSS

SEQ ID NO: 836 - protein, 110 aa, Artificial Sequence
  Description of Artificial Sequence: Synthetic light chain variable region amino acid sequence
QSVLTQPPSVSGAPGQRVTISCTGSSSNIGAGYDVHWYQQLPGTAPKLLIYGNSNRPSGVPDRFSGSKSGTSASLAITGLQAEDEADYYCQSYDSSLSVVFGGGTKLTVL

SEQ ID NO: 837 - protein, 124 aa, Artificial Sequence
  Description of Artificial Sequence: Synthetic heavy chain variable region amino acid sequence
EVQLLESGGGLVKPGGSLRLSCAASGFTFSSYSMNWVRQAPGKGLEWVSSISSSSSYIYYADSVKGRFTISRDNAKNSLYLQMNSLRAEDTAVYYCARDGSPINWVSPFPFDYWGQGTLVTVSS

SEQ ID NO: 838 - protein, 111 aa, Artificial Sequence
  Description of Artificial Sequence: Synthetic light chain variable region amino acid sequence
QPVLTQPPSVSGAPGQRVTISCTGSSSNIGAGYDVHWYQQLPGTAPKLLIYGNSNRPSGVPDRFSGSKSGTSASLAITGLQAEDEADYYCQSYDSSLSGSVFGGGTQLTVL

SEQ ID NO: 839 - protein, 123 aa, Artificial Sequence
  Description of Artificial Sequence: Synthetic heavy chain variable region amino acid sequence
EVQLLESGGGLVKPGGSLRLSCAASGLTFSDYYMSWIRQAPGKGLEWVSYISGGSSYSNYADSVKGRFTISRDNAKNSLYLQMNSLRAEDTAVYYCARGYCSGSSCYEAFDIWGQGTTVTVSS

SEQ ID NO: 840 - protein, 111 aa, Artificial Sequence
  Description of Artificial Sequence: Synthetic light chain variable region amino acid sequence
SYVLTQPPSVSGAPGQRVTISCTGSSSNIGAGFDVHWYQQLPGTAPKLLIYGNSDRPSGVPDRFSGSKSGTSASLAITGLQAEDEADYYCQSYDSSLSGYVFGTGTKVTVL

SEQ ID NO: 841 - protein, 124 aa, Artificial Sequence
  Description of Artificial Sequence: Synthetic heavy chain variable region amino acid sequence
QVQLVQSGGGLVKPGGSLRLSCAASGFTFSSYSMNWVRQAPGKGLEWVSSISGGSSYIYYADSVKGRFTISRDNAKNSLYLQMNSLRAEDTAVYYCAREAYYYDSSGLKWFDPWGQGTLVTVSS

SEQ ID NO: 842 - protein, 110 aa, Artificial Sequence
  Description of Artificial Sequence: Synthetic light chain variable region amino acid sequence
QSVLTQPPSVSGAPGQRVTISCTGSSSNIGAGYDVHWYQQLPGTAPKLLIYGNSNRPSGVPDRFSGSKSGTSASLAITGLQAEDEADYYCQSYDSSLGWVFGGGTKLTVL

SEQ ID NO: 843 - protein, 127 aa, Artificial Sequence
  Description of Artificial Sequence: Synthetic heavy chain variable region amino acid sequence
EVQLLESGPGLVKPSQTLSLTCTVSGGSISSGGYYWSWIRQHPGKGLEWIGYIYYSGSTYYNPSLKSRVTISVDTSKNQFSLKLSSVTAADTAVYYCARLEIGDGSGSYLHWYFDLWGRGTLVTVSS

SEQ ID NO: 844 - protein, 106 aa, Artificial Sequence
  Description of Artificial Sequence: Synthetic light chain variable region amino acid sequence
SYELTQPPSVSVSPGQTASITCSGDKLGDKYACWYQQKPGQSPVLVIYQDSKRPSGIPERFSGSNSGNTATLTISGTQAMDEADYYCQAWDSSTAVFGGGTKLTVL

SEQ ID NO: 845 - protein, 121 aa, Artificial Sequence
  Description of Artificial Sequence: Synthetic heavy chain variable region amino acid sequence
EVQLVESGGGLVKPGGSLRLSCAASGFTFSSYSMNWVRQAPGKGLEWVSSISSSRSYIYYADSVKGRFTISRDNAKNSLYLQMNSLRAEDTAVYYCARVGSGGSGTYGDYWGQGTLVTVSS

SEQ ID NO: 846 - protein, 111 aa, Artificial Sequence; identical to SEQ ID NO: 288
  Description of Artificial Sequence: Synthetic light chain variable region amino acid sequence

SEQ ID NO: 847 - protein, 120 aa, Artificial Sequence
  Description of Artificial Sequence: Synthetic heavy chain variable region amino acid sequence
EVQLVESGGGLVKPGGSLRLSCAASGFTFSSYSMNWVRQAPGKGLEWVSSISSSSSYIYYADSVKGRFTISRHNAKNSLYLQMNSLRAEDTAVYYCARGSSSSWFCFDYWGQGTLVTVSS

SEQ ID NO: 848 - protein, 110 aa, Artificial Sequence
  Description of Artificial Sequence: Synthetic light chain variable region amino acid sequence
SYVLTQPPSVSGAPGQRVTISCTGSSSNIGAGYDVHWYQQLPGTAPKLLIYGNSNRPSGVPDRFSGSKSGTSASLAITGLQAEDEADYYCQSYDSSLSYVFGTGTKLTVL

SEQ ID NO: 849 - protein, 125 aa, Artificial Sequence
  Description of Artificial Sequence: Synthetic heavy chain variable region amino acid sequence
GVQLVESGPGLVKPSETLSLTCTVSGGSISSYYWSWIRQPPGKGLEWIGYIYYSGSTNYNPSLKSRVTISVDTSKNQFSLKLSSVTAADTAVYYCARGYYYDSSGYYPNDAFDIWGQGTMVTVSS

SEQ ID NO: 850 - protein, 107 aa, Artificial Sequence
  Description of Artificial Sequence: Synthetic light chain variable region amino acid sequence
DIQVTQSPSSLSASVGDRVTITCRASQSISSYLNWYQQKPGKAPKLLIYAASSLQSGVPSRFSGSGSGTDFTLTISSLQPEDFATYYCQQSYSTPYTFGQGTKVEIK

SEQ ID NO: 851 - protein, 131 aa, Artificial Sequence
  Description of Artificial Sequence: Synthetic heavy chain variable region amino acid sequence
QVQLVQSGAEVKKPGESLKISCKGSGYSFTSYWIGWVRQMPGKGLEWMGIIYPGDSDTRYSPSFQGQVTISADKSISTAYLQWSSLKASDTAMYYCARHVGQVYCSSTSCYTSREYYFDYWGQGTLVTVSS

SEQ ID NO: 852 - protein, 107 aa, Artificial Sequence
  Description of Artificial Sequence: Synthetic light chain variable region amino acid sequence
SYVLTQPPSVSVSPGQTASITCSGDKLGDKYACWYQQKPGQSPVLVIYQDSKRPSGIPERFSGSNSGNTATLTISGTQAMDEADYYCQAWDSSTAVVFGGGTKLTVL

SEQ ID NO: 853 - protein, 120 aa, Artificial Sequence
  Description of Artificial Sequence: Synthetic heavy chain variable region amino acid sequence
EVQLVESGGGLVKPGGSLRLSCAASGFTFSSYSMNWVRQAPGKGLEWVSSISSSSSYIYYADSVKGRFTISRDNAKNSLYLQMNSLRAEDTAVYYCARDDSSSWYYFDYWGQGTLVTVSS

SEQ ID NO: 854 - protein, 111 aa, Artificial Sequence; identical to SEQ ID NO: 768
  Description of Artificial Sequence: Synthetic light chain variable region amino acid sequence

SEQ ID NO: 855 - protein, 121 aa, Artificial Sequence
  Description of Artificial Sequence: Synthetic heavy chain variable region amino acid sequence
EVQLLESGGGLVKPGGSLRLSCAASGFTFSSYSMNWVRQAPGKGLEWVSSISSSSSYIYYADSVKGRFTISRDNAKNSLYLQMNSLRAEDTAVYYCARLDYSNYYYYMDVWGKGTTVTVSS

SEQ ID NO: 856 - protein, 111 aa, Artificial Sequence; identical to SEQ ID NO: 342
  Description of Artificial Sequence: Synthetic light chain variable region amino acid sequence

SEQ ID NO: 857 - protein, 124 aa, Artificial Sequence
  Description of Artificial Sequence: Synthetic heavy chain variable region amino acid sequence
EVQLVESGGGLVKPGGSLRLSCAASGFTFSSYSMNWVRQAPGKGLEWVSSISSSSSYIYYADSVKGRFTISRDNAKNSLYLQMNSLRAEDTAVYYCARGGYSYGAYYYYYMDVWGKGTTVTVSS

SEQ ID NO: 858 - protein, 112 aa, Artificial Sequence
  Description of Artificial Sequence: Synthetic light chain variable region amino acid sequence
QSVLTQPPSVSGAPGQRVTISCTGSSSNIGAGYDVHWYQQLPGTAPKLLIYGNSNRPSGVPDRFSGSKSGTSASLAITGLQAEDEADYYCQSYDSSLSGYWVFGGGTKLTVL

SEQ ID NO: 859 - protein, 124 aa, Artificial Sequence; identical to SEQ ID NO: 857
  Description of Artificial Sequence: Synthetic heavy chain variable region amino acid sequence

SEQ ID NO: 860 - protein, 112 aa, Artificial Sequence
  Description of Artificial Sequence: Synthetic light chain variable region amino acid sequence
QSVLTQPPSVSGAPGQRVTISCTGSSSNIGAGYDVHWYQQLPGTAPKLLIYGNSNRPSGVPDRFSGSKSGTSASLAITGLQAEDEADYYCQSYDSSLSGYWVFGGGTKVTVL

SEQ ID NO: 861 - protein, 122 aa, Artificial Sequence
  Description of Artificial Sequence: Synthetic heavy chain variable region amino acid sequence
EVQLVESGGGLVKPGGSLRLSCAASGFTFSSYSMNWVRQAPGKGLEWVSSISSSSSYIYYADSVKGRFTISRDNAKNSLYLQMNSLRAEDTAVYYCARSIAVAGTGYGMDVWGQGTTVTVSS

SEQ ID NO: 862 - protein, 110 aa, Artificial Sequence; identical to SEQ ID NO: 836
  Description of Artificial Sequence: Synthetic light chain variable region amino acid sequence

SEQ ID NO: 863 - protein, 125 aa, Artificial Sequence
  Description of Artificial Sequence: Synthetic heavy chain variable region amino acid sequence
EVQLLESGPGLVKPSQTLSLTCTVSGGSISSGGYYWSWIRQHPGKGLEWIGYIYYSGSTYYNPSLKSRVTISVDTSKNQFSLKLSSVTAADTAVYYCAREVVPAAIRAGYYFDYWGQGTLVTVSS

SEQ ID NO: 864 - protein, 107 aa, Artificial Sequence
  Description of Artificial Sequence: Synthetic light chain variable region amino acid sequence
SYELMQPPSVSVSPGQTASITCSGDKLGDKYACWYQQKPGQSPVLVIYQDSKRPSGIPERFSGSNSGNTATLTISGTQAMDEADYYCQAWDSSTGGVFGTGTQLTVL

SEQ ID NO: 865 - protein, 124 aa, Artificial Sequence
  Description of Artificial Sequence: Synthetic heavy chain variable region amino acid sequence
QVQLVQSGGGLVKPGGSLRLSCAASGFTFSSYSMNWVRQAPGKGLEWVSSISSSSSYIYYADSVKGRFTISRDNAKNSLYLQMNSLRAEDTAVYYCARGYCTNGVCYLDAFDIWGQGTTVTVSS

SEQ ID NO: 866 - protein, 111 aa, Artificial Sequence
  Description of Artificial Sequence: Synthetic light chain variable region amino acid sequence
QSVLIQPASVSGSPGQSITISCTGTSSDVGGYNYVSWYQQHPGKAPKLMIYDVSNRPSGVSNRFSGSKSGNTASLTISGLQAEDEADYYCSSYTSSSTPVVFGGGTKVTVL

SEQ ID NO: 867 - protein, 119 aa, Artificial Sequence
  Description of Artificial Sequence: Synthetic heavy chain variable region amino acid sequence
QVQLVQSGGGLVKPGGSLRLSCAASGFTFSSYSMNWVRQAPGKGLEWVSSISSSSSYIYYADSVKGRFTISRDNAKNSLYLQMNSLRAEDTAVYYCARVASEVWFFDLWGRGTLVTVSS

SEQ ID NO: 868 - protein, 111 aa, Artificial Sequence; identical to SEQ ID NO: 342
  Description of Artificial Sequence: Synthetic light chain variable region amino acid sequence

SEQ ID NO: 869 - protein, 124 aa, Artificial Sequence
  Description of Artificial Sequence: Synthetic heavy chain variable region amino acid sequence
EVQLLESGGGLVQPGGSLRLSCAASGFTFSSYWMSWVRQAPGKGLEWVANIKQDGSEKYYVDSVKGRFTISRDNAKNSLYLQMNSLRAEDTAVYYCARDGLLQYDFWSGYYDYWGQGTLVTVSS

SEQ ID NO: 870 - protein, 107 aa, Artificial Sequence
  Description of Artificial Sequence: Synthetic light chain variable region amino acid sequence
EIVLTQSPSSLSASVGDRVTITCRASQGISSWLAWYQQKPEKAPKSLIYAASSLQSGVPSRFSGSGSGTDFTLTISSLQPEDFATYYCQQYNSYPFTFGPGTKVDIK

SEQ ID NO: 871 - protein, 123 aa, Artificial Sequence
  Description of Artificial Sequence: Synthetic heavy chain variable region amino acid sequence
QVQLVQSGAEVKKPGSSVKVSCKASGGTFSSYAISWVRQAPGQGLEWMGGIIPIFGTANYAQKFQGRVTITADESTSTAYMELSSLRSEDTAVYYCARDHWSNPLYYYGMDVWGQGTTVTVSS

SEQ ID NO: 872 - protein, 107 aa, Artificial Sequence
  Description of Artificial Sequence: Synthetic light chain variable region amino acid sequence
SYELTQPPSVSVSPGQTARITCSGDVLAKKYARWFQQKPGQAPVLVIYKDSERPSGIPERFSGSSSGTTVTLTISGAQVEDEADYYCYSAADNNLGVFGGGTQLTVL

SEQ ID NO: 873 - protein, 124 aa, Artificial Sequence
  Description of Artificial Sequence: Synthetic heavy chain variable region amino acid sequence
EVQLLESGAEVKKPGSSVKVSCKASGGTFSSYAISWVRQAPGQGLEWMGGIIPIFGTANYAQKFQGRVTITADESTSTAYMELSSLRSEDTAVYYCARSRYSGSYYYYYGMDVWGQGTTVTVSS

SEQ ID NO: 874 - protein, 106 aa, Artificial Sequence
  Description of Artificial Sequence: Synthetic light chain variable region amino acid sequence
QPVLTQPPSVSVSPGQTASITCSGDKLGDKYACWYQQKPGQSPVLVIYQDSKRPSGIPERFSGSNSGNTATLTISGTQAMDEADYYCQAWDSSTYVFGTGTKLTVL

SEQ ID NO: 875 - protein, 120 aa, Artificial Sequence
  Description of Artificial Sequence: Synthetic heavy chain variable region amino acid sequence
EVQLVESGGGLVKPGGSLRLSCAASGFTFSSYSMNWVRQAPGKGLEWVSSISSSSSYIYYADSVKGRFTISRDNAKNSLYLQMNSLRAEDTAVYYCARVVGYSGSYLDYWGQGTLVTVSS

SEQ ID NO: 876 - protein, 111 aa, Artificial Sequence
  Description of Artificial Sequence: Synthetic light chain variable region amino acid sequence
QSVVTQPPSVSGAPGQRVTISCTGSSSNIGAGYDVHWYQQLPGTAPKLLIYGNSNRPSGVPDRFSGSKSGTSASLAITGLQAEDEADYYCQSYDSSLSGVVFGGGTKLTVL

SEQ ID NO: 877 - protein, 124 aa, Artificial Sequence
  Description of Artificial Sequence: Synthetic heavy chain variable region amino acid sequence
EVQLVQSGAEVKKPGSSVKVSCKASGGTFSSYAISWVRQAPGQGLEWMGGIIPIFGTANYAQKFQGRVTITADESTSTAYMELSSLRSEDTAVYYCARSRYSGSYYYYYGMDVWGQGTTVTVSS

SEQ ID NO: 878 - protein, 106 aa, Artificial Sequence
  Description of Artificial Sequence: Synthetic light chain variable region amino acid sequence
SYELTQPPSVSVSPGQTASITCSGDKLGDKYACWYQQKPGQSPVLVIYQDSKRPSGIPERFSGSNSGNTATLTISGTQAMDEADYYCQAWDSSTYVFGTGTKLTVL

SEQ ID NO: 879 - protein, 118 aa, Artificial Sequence
  Description of Artificial Sequence: Synthetic heavy chain variable region amino acid sequence
QVQLVQSGAEVKKPGASVKVSCKASGYTFTGYYMHWVRQAPGQGLEWMGWINPNSGGTNYAQKFQGRVTMTRDTSISTAYMELSRLRSDDTAVYYCARDWAWDAFDIWGQGTMVTVSS

SEQ ID NO: 880 - protein, 110 aa, Artificial Sequence
  Description of Artificial Sequence: Synthetic light chain variable region amino acid sequence
QPGLTQPASVSGSPGQSITISCTGTSSDVGGYNYVSWYQQHPGKAPKLMIYDVSNRPSGVSNRFSGSKSGNTASLTISGLQAEDEADYYCSSYTSSSTLVFGGGTKLTVL

SEQ ID NO: 881 - protein, 118 aa, Artificial Sequence
  Description of Artificial Sequence: Synthetic heavy chain variable region amino acid sequence
EVQLVESGAEVKKPGASVKVSCKASGYTFTGYYMHWVRQAPGQGLEWMGWINPNSGGTNYAQKFQGRVTMTRDTSISTAYMELSRLRSDDTAVYYCARDWAWDAFDIWGQGTMVTVSS

SEQ ID NO: 882 - protein, 110 aa, Artificial Sequence
  Description of Artificial Sequence: Synthetic light chain variable region amino acid sequence
QSVLIQPASVSGSPGQSITISCTGTSSDVGGYNYVSWYQQHPGKAPKLMIYDVSNRPSGVSNRFSGSKSGNTASLTISGLQAEDEADYYCSSYTSSSTLVFGGGTQLTVL

SEQ ID NO: 883 - protein, 123 aa, Artificial Sequence
  Description of Artificial Sequence: Synthetic heavy chain variable region amino acid sequence
EVQLLESGGGLVKPGGSLRLSCAASGFTFSSYSMNWVRQAPGKGLEWVSSISSSSSYIYYADSVKGRFTISRDNAKNSLYLQMNSLRAEDTAVYYCAREWSPIVVVTNAFDIWGQGTMVTVSS

SEQ ID NO: 884 - protein, 111 aa, Artificial Sequence; identical to SEQ ID NO: 324
  Description of Artificial Sequence: Synthetic light chain variable region amino acid sequence

SEQ ID NO: 885 - protein, 120 aa, Artificial Sequence
  Description of Artificial Sequence: Synthetic heavy chain variable region amino acid sequence
QVQLVQSGGGLVKPGGSLRLSCAASGFTFSSYSMNWVRQAPGKGLEWVSSISSSSSYIYYADSVKGRFTISRDNAKNSLYLQMNSLRAEDTAVYYCARGSSSSWYYFDYWGQGTLVTVSS

SEQ ID NO: 886 - protein, 110 aa, Artificial Sequence; identical to SEQ ID NO: 692
  Description of Artificial Sequence: Synthetic light chain variable region amino acid sequence

SEQ ID NO: 887 - protein, 118 aa, Artificial Sequence
  Description of Artificial Sequence: Synthetic heavy chain variable region amino acid sequence
QVQLVQSGAEVKKPGASVKVSCKASGYTFTGYYMHWVRQAPGQGLEWMGWINPNSGGTNYAQKFQGWVTMTRDTSISTAYMELSRLRSDDTAVYYCARDANWGAFDIWGQGTMVTVSS

SEQ ID NO: 888 - protein, 110 aa, Artificial Sequence
  Description of Artificial Sequence: Synthetic light chain variable region amino acid sequence
QSVLIQPASVSGSPGQSITISCTGTSSDVGGYNYVSWYQQHPGKAPKLMIYDVSNRPSGVSNRFSGSKSGNTASLTISGLQAEDEADYYCSSYTSSSTWVFGGGTKLTVL

SEQ ID NO: 889 - protein, 125 aa, Artificial Sequence
  Description of Artificial Sequence: Synthetic heavy chain variable region amino acid sequence
EVQLVESGGGLVQPGGSLRLSCAASGFTFSSYAMSWVRQAPGKGLEWVSAISGSGGSTYYADSVKGRFTISRDNSKNTLYLQMNSLRAEDTAVYYCAKDYYYDSSGYPPYGIGVWGQGTTVTVSS

SEQ ID NO: 890 - protein, 110 aa, Artificial Sequence
  Description of Artificial Sequence: Synthetic light chain variable region amino acid sequence
QTVVTQEPSFSVSPGGTVTLTCGLSSGSVSTSYYPSWYQQTPGQAPRTLIYSTNTRSSGVPDRFSGSILGNKAALTITGAQADDESDYYCVLYMGSGIWVFGGGTKVTVL

SEQ ID NO: 891 - protein, 117 aa, Artificial Sequence
  Description of Artificial Sequence: Synthetic heavy chain variable region amino acid sequence
EVQLLESGGGLIQPGGSLRLSCAASGFTVSSNYMSWVRQAPGKGLEWVSVIYSGGSTYYADSVKGRFTISRDNSKNTLYLQMNSLRAEDTAVYYCARGGIADAFDIWGQGTMVTVSS

SEQ ID NO: 892 - protein, 107 aa, Artificial Sequence
  Description of Artificial Sequence: Synthetic light chain variable region amino acid sequence
ETTLTQSPSSVSASVGDRVTITCRASQGISSWLAWYQQKPGKAPKLLIYAASSLQSGVPSRFSGSGSGTDFTLTISSLQPEDFATYYCQQANSFPRTFGQGTKLEIK

SEQ ID NO: 893 - protein, 125 aa, Artificial Sequence
  Description of Artificial Sequence: Synthetic heavy chain variable region amino acid sequence
EVQLVESGGGLIQPGGSLRLSCAASGFTVSSNYMSWVRQAPGKGLEWVSVIYSGGSTYYADSVKGRFTISRDNSKNTLYLQMNSLRAEDTAVYYCARGPQFGVSYSSGWYSFDYWGQGTLVTVSS

SEQ ID NO: 894 - protein, 111 aa, Artificial Sequence
  Description of Artificial Sequence: Synthetic light chain variable region amino acid sequence
QSVLIQPRSVSGSPGQSVTISCTGTSSDVGGYNYVSWYQQHPGKAPKLMIYDVSKRPSGVPDRFSGSKSGNTASLTISGLQAEDEADYYCCSYAGSYTFVVFGGGTKLTVL

SEQ ID NO: 895 - protein, 124 aa, Artificial Sequence
  Description of Artificial Sequence: Synthetic heavy chain variable region amino acid sequence
QVQLVQSGGGLVKPGGSLRLSCAASGFTFSSYSMNWVRQAPGKGLEWVSSISSSSSYIYYADSVKGRFTISRDNAKNSLYLQMNSLRAEDTAVYYCARVSSGWYGGGAYYFDYWGQGTLVTVSS

SEQ ID NO: 896 - protein, 112 aa, Artificial Sequence
  Description of Artificial Sequence: Synthetic light chain variable region amino acid sequence
QSVVTQPPSVSGAPGQRVTISCTGSSSNIGAGYDVHWYQQLPGTAPKLLIYGNSNRPSGVPDRFSGSKSGTSASLAITGLQAEDEADYYCQSYDSSLSALYVFGTGTKVTVL

SEQ ID NO: 897 - protein, 123 aa, Artificial Sequence
  Description of Artificial Sequence: Synthetic heavy chain variable region amino acid sequence
QVQLVQSGGGLVKPGGSLRLSCAASGFTFSSYSMNWVRQAPGKGLEWVSSISSSSSYIYYADSVKGRFTISRDNAKNSLYLQMNSLRAEDTAVYYCARQRGGIAVAGTYFDLWGRGTLVTVSS

SEQ ID NO: 898 - protein, 108 aa, Artificial Sequence
  Description of Artificial Sequence: Synthetic light chain variable region amino acid sequence
QPVLTQPPSVSGAPGQRVTISCTGSSSNIGAGYDVHWYQQLPGTAPKLLIYGNSNRPSGVPDRFSGSKSGTSASLAITGLQAEDEADYYCQSYDSTVVFGGGTKLTVL

SEQ ID NO: 899 - protein, 123 aa, Artificial Sequence; identical to SEQ ID NO: 897
  Description of Artificial Sequence: Synthetic heavy chain variable region amino acid sequence

SEQ ID NO: 900 - protein, 108 aa, Artificial Sequence
  Description of Artificial Sequence: Synthetic light chain variable region amino acid sequence
QSVLTQPPSVSGAPGQRVTISCTGSSSNIGAGYDVHWYQQLPGTAPKLLIYGNSNRPSGVPDRFSGSKSGTSASLAITGLQAEDEADYYCQSYDSTVVFGGGTKVTVL

SEQ ID NO: 901 - protein, 122 aa, Artificial Sequence
  Description of Artificial Sequence: Synthetic heavy chain variable region amino acid sequence
EVQLLESGGGLVKPGGSLRLSCAASGFTFSSYSMNWVRQAPGKGLEWVSSISSSSSYIYYADSVKGRFTISRDNAKNSLYLQMNSLRAEDTAVYYCARGYGSGSYLDYFDYWGQGTLVTVSS

SEQ ID NO: 902 - protein, 112 aa, Artificial Sequence
  Description of Artificial Sequence: Synthetic light chain variable region amino acid sequence
QPGLTQPPSVSGAPGQRVTISCTGSSSNIGAGYDVHWYQQLPGTAPKLLIYGNSNRPSGVPDRFSGSKSGTSASLAITGLQAEDEADYYCQSYDSSLSGFYVFGTGTKLTVL

SEQ ID NO: 903 - protein, 119 aa, Artificial Sequence
  Description of Artificial Sequence: Synthetic heavy chain variable region amino acid sequence
EVQLLESGGGLVKPGGSLRLSCAASGFTFSSYSMNWVRQAPGKGLEWVSSISSSSSYIYYADSVKGRFTISRDNAKNSLYLQMNSLRAEDTAVYYCARDAAAKYYFDYWGQGTLVTVSS

SEQ ID NO: 904 - protein, 111 aa, Artificial Sequence
  Description of Artificial Sequence: Synthetic light chain variable region amino acid sequence
QPVLTQPPSVSGAPGQRVTISCTGSSSNIGAGYDVHWYQQLPGTAPKLLIYGNSNRPSGVPDRFSGSKSGTSASLAITGLQAEDEADYYCQSYDSSLSGKVFGTGTKLTVL

SEQ ID NO: 905 - protein, 122 aa, Artificial Sequence
  Description of Artificial Sequence: Synthetic heavy chain variable region amino acid sequence
QVQLVESGGGLVKPGGSLRLSCAASGFTFSDYYMSWIRQAPGKGLEWVSYISSSSSYTNYADSVKGRFTISRDNAKNSLYLQMNSLRAEDTAVYYCARVGYSSSWYNYFDYWGQGTLVTVSS

SEQ ID NO: 906 - protein, 111 aa, Artificial Sequence
  Description of Artificial Sequence: Synthetic light chain variable region amino acid sequence
SYVLTQPPSVSGAPGQRVTISCTGSSSNIGAGYDVHWYQQLPGTAPKLLIYGNSNRPSGVPDRFSGSKSGTSASLAITGLQAEDEADYYCQSYDSSLSGPVFGGGTKLTVL

SEQ ID NO: 907 - protein, 123 aa, Artificial Sequence
  Description of Artificial Sequence: Synthetic heavy chain variable region amino acid sequence
EVQLVESGGGLVKPGGSLRLSCAASGFTFSSYSMNWVRQAPGKGLEWVSSISSSSSYIYYADSVKGRFTISRDNAKNSLYLQMNSLRAEDTAVYYCARIRFDYGSGSYAFDIWGQGTMVTVSS

SEQ ID NO: 908 - protein, 111 aa, Artificial Sequence; identical to SEQ ID NO: 700
  Description of Artificial Sequence: Synthetic light chain variable region amino acid sequence

SEQ ID NO: 909 - protein, 123 aa, Artificial Sequence
  Description of Artificial Sequence: Synthetic heavy chain variable region amino acid sequence
QVQLQQWGAGLLKPSETLSLTCAVYGGSFSGYYWSWIRQPPGKGLEWIGEINHSGSTNYNPSLKSRVTISVDTSKNQFSLKLSSVTAADTAVYYCARGLPRFGVVTPNWFDPWGQGTLVTVSS

SEQ ID NO: 910 - protein, 113 aa, Artificial Sequence
  Description of Artificial Sequence: Synthetic light chain variable region amino acid sequence
EIVLTQSPDSLAVSLGERATINCKSSQSVLYSSNNKNYLAWYQQKPGQPPKLLIYWASTRESGVPDRFSGSGSGTDFTLTISSLQAEDVAVYYCQQYYSTPYTFGQGTKLEIK

SEQ ID NO: 911 - protein, 123 aa, Artificial Sequence
  Description of Artificial Sequence: Synthetic heavy chain variable region amino acid sequence
EVQLLESGGGLVQPGGSLRLSCAASGFTFSSYWMHWVRQAPGKGLVWVSRINSDGSSTSYADSVKGRFTISRDNAKNTLYLQMNSLRAEDTAVYYCAREGDSSGWPGGAFDIWGQGTMVTVSS

SEQ ID NO: 912 - protein, 108 aa, Artificial Sequence
  Description of Artificial Sequence: Synthetic light chain variable region amino acid sequence
SYVLTQPPSVSVSPGQAARITCSGDALPKQYAYWYQQKPGQAPVLVIYKDSERPSGIPERFSGSSSGTTVTLTISGVQAEDEADYYCQSADSSGTFYVFGTGTKLTVL

SEQ ID NO: 913 - protein, 124 aa, Artificial Sequence
  Description of Artificial Sequence: Synthetic heavy chain variable region amino acid sequence
QVQLVQSGAEVKKPGASVKVSCKASGYTFTGYYMHWVRQAPGQGLEWMGWINPNSGGTNYAQKFQGRVTMTRDTSISTAYMELSRLRSDDTAVYYCARDPYSSSSYYYYGMDVWGQGTTVTVSS

SEQ ID NO: 914 - protein, 112 aa, Artificial Sequence
  Description of Artificial Sequence: Synthetic light chain variable region amino acid sequence
DIVLTQSPLSLPVTPGEPASISCRSSQSLLHSNGYNYLDWYLQKPGQSPQLLIYLGSNRASGVPDRFSGSGSGTDFTLKISRVEAEDVGVYYCMQALQTLYTFGQGTKVDIK

SEQ ID NO: 915 - protein, 120 aa, Artificial Sequence
  Description of Artificial Sequence: Synthetic heavy chain variable region amino acid sequence
EVQLVESGAEVKKPGASVKVSCKASGYTFTSYYMHWVRQAPGQGLEWMGIINPSGGSTSYAQKFQGRVTMTRDTSTSTVYMELSSLRSEDTAVYYCARGPYDSSGYCDYWGQGTLVTVSS

SEQ ID NO: 916 - protein, 107 aa, Artificial Sequence
  Description of Artificial Sequence: Synthetic light chain variable region amino acid sequence
SYELMQPPSVSVAPGKTARITCGGNNIGSKSVHWYQQKPGQAPVLVVYDDSDRPSGTPERFSGSNSGNTATLTISRVEAGDEADYYCQVWDSSSDQVFGGGTKVTVL

SEQ ID NO: 917 - protein, 120 aa, Artificial Sequence; identical to SEQ ID NO: 915
  Description of Artificial Sequence: Synthetic heavy chain variable region amino acid sequence

SEQ ID NO: 918 - protein, 107 aa, Artificial Sequence
  Description of Artificial Sequence: Synthetic light chain variable region amino acid sequence
SYELTQPPSVSVAPGKTARITCGGNNIGSKSVHWYQQKPGQAPVLVVYDDSDRPSGIPERFSGSNSGNTATLTISRVEAGDEADYYCQVWDSSSDQVFGGGTKLTVL

SEQ ID NO: 919 - protein, 118 aa, Artificial Sequence
  Description of Artificial Sequence: Synthetic heavy chain variable region amino acid sequence
EVQLVESGGGLVQPGGSLRLSCAASGFTFSSYWMHWVRQAPGKGLVWVSRINSDGSSTSYADSVKGRFTISRDNAKNTLYLQMNSLRAEDTAVYYCARGLYNWNHDYWGQGTLVTVSS

SEQ ID NO: 920 - protein, 110 aa, Artificial Sequence
  Description of Artificial Sequence: Synthetic light chain variable region amino acid sequence
NFMLTQPHSVSESPGKTVTISCTRSSGSIASNYVQWYQQRPGSSPTTVIYEDNQRPSGVPDRFSGSIDSSSNSASLTISGLKTEDEADYYCQSYDSSNVVFGGGTKVTVL

SEQ ID NO: 921 - protein, 119 aa, Artificial Sequence
  Description of Artificial Sequence: Synthetic heavy chain variable region amino acid sequence
QVTLKESGGGLVKPGGSLRLSCAASGFTFSSYSMNWVRQAPGKGLEWVSSISSSSSYIYYADSVKGRFTISRDNAKNSLYLQMNSLRAEDTAVYYCARYSSSLGAFDIWGQGTMVTVSS

SEQ ID NO: 922 - protein, 110 aa, Artificial Sequence
  Description of Artificial Sequence: Synthetic light chain variable region amino acid sequence
QSALTQPPSVSGAPGQRVTISCTGSSSNIGAGYDVHWYQQLPGTAPKLLIYGNSNRPSGVPDRFSGSKSGTSASLAITGLQAEDEADYYCQSYDSSLSDVFGTGTKLTVL

SEQ ID NO: 923 - protein, 119 aa, Artificial Sequence
  Description of Artificial Sequence: Synthetic heavy chain variable region amino acid sequence
QVQLVESGGGVVQPGRSLRLSCAASGFTFSSYGMHWVRQAPGKGLEWVAVIWYDGSNKYYADSVKGRFTISRDNSKNTLYLQMNSLRAEDTAVYYCARDSTYSEAFDIWGQGTMVTVSS

SEQ ID NO: 924 - protein, 110 aa, Artificial Sequence
  Description of Artificial Sequence: Synthetic light chain variable region amino acid sequence
QSVLIQPASVSGSPGQSITISCTGTSSDVGGYNYVSWYQQHPGKAPKLMIYDVSNRPSGVSNRFSGSKSGNTASLTISGLQAEDEADYYCSSYTSSSTWVFGGGTKVTVL

SEQ ID NO: 925 - protein, 119 aa, Artificial Sequence
  Description of Artificial Sequence: Synthetic heavy chain variable region amino acid sequence
EVQLVESGGGLVKPGGSLRLSCAASGFTFSSYSMNWVRQAPGKGLEWVSSISSSSSYIYYADSVKGRFTISRDNAKNSLYLQMNSLRAEDTAVYYCARYSSSLGAFDIWGQGTTVTVSS

SEQ ID NO: 926 - protein, 110 aa, Artificial Sequence
  Description of Artificial Sequence: Synthetic light chain variable region amino acid sequence
QSVLTQPPSVSGAPGQRVTISCTGSSSNIGAGYDVHWYQQLPGTAPKLLIYGNSNRPSGVPDRFSGSKSGTSASLAITGLQAEDEADYYCQSYDSSLSDVFGTGTKVTVL

SEQ ID NO: 927 - protein, 120 aa, Artificial Sequence
  Description of Artificial Sequence: Synthetic heavy chain variable region amino acid sequence
EVQLVESGGGLVKPGGSLRLSCAASGFTFSSYSMNWVRQAPGKGLEWVSSISSSSSYIYYADSVKGRFTISRDNAKNSLYLQMNSLRAEDTAVYYCARYQSSSWYYFDYWGQGTLVTVSS

SEQ ID NO: 928 - protein, 111 aa, Artificial Sequence
  Description of Artificial Sequence: Synthetic light chain variable region amino acid sequence
SYVLTQPPSVSGAPGQRVTISCTGSSSNIGAGYDVHWYQQLPGTAPKLLIYGNSNRPSGVPDRFSGSKSGTSASLAITGLQAEDEADYYCQSYDSSLSGVVFGGGTKLTVL

SEQ ID NO: 929 - protein, 119 aa, Artificial Sequence
  Description of Artificial Sequence: Synthetic heavy chain variable region amino acid sequence
QVQLQESGPGLVKPSETLSLTCTVSPPSISSSSYYWGWIRQPPGKGLEWIGSIYYSGSTYYNPSLKSRVTISVDTSKNQFSLKLSSVTAADTAVYYCARPDSSGAFDIWGQGTMVTVSS

SEQ ID NO: 930 - protein, 108 aa, Artificial Sequence
  Description of Artificial Sequence: Synthetic light chain variable region amino acid sequence
SYELTQPPSVSVSPGQTARITCSADALPKQYAYWYQQKPGQAPVLVIYKDSERPSGIPERFSGSSSGTTVTLTISGVQAEDEADYYCQSADSSGTYVVFGGGTKLTVL

SEQ ID NO: 931 - protein, 123 aa, Artificial Sequence
  Description of Artificial Sequence: Synthetic heavy chain variable region amino acid sequence
EVQLVQSGAEVKKPGASVRVYCKASGYTFTTYYIHWVRQAPGQGLEWMGMINPSGGTTSYAQKFQGRLTMTGDTSTSTVYMELNYLRSEDTAVYYCTRDFIYFYGSGDGFDYWGQGTLVTVSS

SEQ ID NO: 932 - protein, 107 aa, Artificial Sequence
  Description of Artificial Sequence: Synthetic light chain variable region amino acid sequence
EIVMTQSPSAMSASVGDRVTITCRASQGISNYLAWFQQKPGKVPKRLIYAASSLQSGVPSRFSGSGSGTEFTLTITSLQPEDFATYYCLQHNSYPFTFGPGTKVEIK

SEQ ID NO: 933 - protein, 125 aa, Artificial Sequence
  Description of Artificial Sequence: Synthetic heavy chain variable region amino acid sequence
QVQLVQSGAEVKKPGSSVKVSCKASGGTFSTYTINWVRQAPGQGLEWMGRITPSLGVPLSAQKFQGRITISADKSTTTAYMELSSLGSEDTAVYYCASLNYYDTTDYYLGYSDSWGQGTLVTVSS

SEQ ID NO: 934 - protein, 109 aa, Artificial Sequence
  Description of Artificial Sequence: Synthetic light chain variable region amino acid sequence
DIVLTQTPATLSVSPGERATLSCRASHSVSNNLAWYQQKPGQAPRLLIYSASTRATGIPARFSGRGSGTEFTLTISSLQPEDFAVYYCQQYNNWPPEYTFGQGTKVDIK

SEQ ID NO: 935 - protein, 119 aa, Artificial Sequence
  Description of Artificial Sequence: Synthetic heavy chain variable region amino acid sequence
EVQLLESGGGLVKPGGSLRLSCAASGFTFSGYYMTWIRQAPEKGLEWVSYISGGSTYTNYADSVRGRFTISRDNARNSLYLQMNSLRAEDTAVYYCARDGGYGIGPLYWGQGSLVTVSS

SEQ ID NO: 936 - protein, 111 aa, Artificial Sequence
  Description of Artificial Sequence: Synthetic light chain variable region amino acid sequence
QPVLTQPPSVSGAPGQRVTISCTGSSSNIGAPFDVHWYQQLPGTAPKPLIYGNSNRPSGVPDRFSGSKSGTSASLAITGLQAEDEADYYCQSYDSSLGGYVFGTGTKLTVL

SEQ ID NO: 937 - protein, 125 aa, Artificial Sequence
  Description of Artificial Sequence: Synthetic heavy chain variable region amino acid sequence
EVQLVESGGGLVKPGGSLRLSCAASGFAFNNYYMNWVRQAPGKGLEWVSSISSASTYTDYADSVKGRFTISRDNAKNSLYLHLNSLRAEDTAVYYCARDYYGSGNYYNPKPLDVWGQGTTVTVSS

SEQ ID NO: 938 - protein, 110 aa, Artificial Sequence
  Description of Artificial Sequence: Synthetic light chain variable region amino acid sequence
QPVLTQPPSVSGAPGQRVTISCTGSSSNIGAGYDVHWYRQFPGTAPELLIYGNTNRPSGVPDRFSGSKSGTSASLAITGLQAEDEADYYCQSYDSSLKGVFGGGTKLTVL

SEQ ID NO: 939 - protein, 122 aa, Artificial Sequence
  Description of Artificial Sequence: Synthetic heavy chain variable region amino acid sequence
EVQLLESGGGLVKPGGSLRLSCAASGFKFRSYSMNWVRQAPGKGLEWVSSISSSSSYVDYAGSLKGRFTISRDNAENSLYLQMNSLRAEDTAMYYCARAGSVPVAGTYNDYWGQGTLVTVSS

SEQ ID NO: 940 - protein, 110 aa, Artificial Sequence
  Description of Artificial Sequence: Synthetic light chain variable region amino acid sequence
QSVLTQPPSVSGAPGQRVTISCTGSSSNIGAGYDVHWYQHLPGTAPKLLIHGNNNRPAGVPDRFSGSKSGTSASLVITGLQADDEADYYCQSYDRSLSVLFGGGTKVTVL

SEQ ID NO: 941 - protein, 122 aa, Artificial Sequence
  Description of Artificial Sequence: Synthetic heavy chain variable region amino acid sequence
QVQLVQSGGGLVQPGGSLRLSCAASGFTFSSYEMNWVRQAPGKGLEWISYISSSGDTKYYADSVKGRFTVSRDNAKYSLYLQMDSLRAEDTAVYYCASLYDSRGYYWVFDYWGQGTLVTVSS

SEQ ID NO: 942 - protein, 107 aa, Artificial Sequence
  Description of Artificial Sequence: Synthetic light chain variable region amino acid sequence
DIVMTQSPSSLSASVGDRVTITCQASQDISTYLNWYQHKPGKAPNLLIYDASNLEPGVPSRFSGSGSGTDFTFTISSLQPEDIATYYCLQHDNLPPTFGQGTKVDIK

SEQ ID NO: 943 - protein, 116 aa, Artificial Sequence
  Description of Artificial Sequence: Synthetic heavy chain variable region amino acid sequence
QVQLVQSGAEVKKPGESLKISCKGSGYSFRSYWIAWVRQMPGKGLEWMGTIFPGDSDVTYSPSFQGQVTISVDKSTSTAYLQWGSLKASDTAIYYCARRYDYIDFWGQGTLVTVSS

SEQ ID NO: 944 - protein, 108 aa, Artificial Sequence
  Description of Artificial Sequence: Synthetic light chain variable region amino acid sequence
DIQMTQSPSSLSASVGDRVTITCQASQDIINHLNWYQQKPGKAPKLLIYDASNLHPGVPSRFSGSGSGTYFTFTISSLQPDDFATYYCQQYDFLAHITFGPGTKVDIK

SEQ ID NO: 945 - protein, 121 aa, Artificial Sequence
  Description of Artificial Sequence: Synthetic heavy chain variable region amino acid sequence
QVTLKESGAELRKPGESLKISCKASGYRFTNYWIGWVRQMPGKGLEWMGVIYPGDSDTKYSPSFQGQVTMSADKSINTAYLQWSSLKASDTAIYYCVSLFGDYDYGALDYWGQGTLVTVSS

SEQ ID NO: 946 - protein, 108 aa, Artificial Sequence
  Description of Artificial Sequence: Synthetic light chain variable region amino acid sequence
ETTLTQSPATLSMSPGERATLSCRASQSVGRNLAWYQQKPGQAPRLLIYGASIRATGILARFSGSGSGTEYTLTISSLQPEDFAVYYCQQYHDWPSFTFGPGTKVDIK

SEQ ID NO: 947 - protein, 121 aa, Artificial Sequence
  Description of Artificial Sequence: Synthetic heavy chain variable region amino acid sequence
EVQLVESGAEVKKPGESLKISCKASGYSFTRYWIGWVRQMPGKGLEWMGIIFPGDSDTRYCPSFEGQVTISADRSINTAYLQWSSLKASDSAMYYCVTLYTDYDYGAPDHWGQGTLVTVSS

SEQ ID NO: 948 - protein, 108 aa, Artificial Sequence
  Description of Artificial Sequence: Synthetic light chain variable region amino acid sequence
DIVLTQSPATLSVSPGERATLSCRASQSLSGDLAWYQQKPGQAPRLLIYATSTRATGIPARFSGSGSGAEFTLTISSLQSEDFAVYYCQQYYDWPLLTFGPGTKVEIK

SEQ ID NO: 949 - protein, 128 aa, Artificial Sequence
  Description of Artificial Sequence: Synthetic heavy chain variable region amino acid sequence
EVQLVQSGAEVKKPGGSVKVSCKASGYTFSEYYMHWVRQAPGQGPEWVGRINPKSGRTNYAQNFQGRVTMTRDRSISTVYMDLSRLRSDDTAVYYCARWEVMDYGSGIYYNQDHFDYWGQGTLVTVSS

SEQ ID NO: 950 - protein, 107 aa, Artificial Sequence
  Description of Artificial Sequence: Synthetic light chain variable region amino acid sequence
DIRVTQSPSSLSASVGDRVTITCRASQDITNYLAWFQQKPGKAPKSLMYAASTLQSGVPSRFSGSGSGTDFTLTISSLQPEDFATYYCQQYKTYPITFGQGTRLEIK

SEQ ID NO: 951 - protein, 118 aa, Artificial Sequence
  Description of Artificial Sequence: Synthetic heavy chain variable region amino acid sequence
QVQLVQSGPGLVKPSETLSLTCTVSAGSISNFYWSWIRQPPGKGLEWIGYIYYSGSTSYNPSLKSRVTISVDTSKNQFSLKLSSVTAADTAVYYCARSRSGWSLYDYWGQGTLVTVSS

SEQ ID NO: 952 - protein, 107 aa, Artificial Sequence
  Description of Artificial Sequence: Synthetic light chain variable region amino acid sequence
DIQVTQSPSSLSASVGDRVTITCRASQSISSFLNWYQQKPGKAPKLLIYVASSLQSGVPSRFSGSGSGTDFTLTISSLQPEDFATYYCQQSYNTPLTFGGGTKVDIK

SEQ ID NO: 953 - protein, 121 aa, Artificial Sequence
  Description of Artificial Sequence: Synthetic heavy chain variable region amino acid sequence
QVQLVQSGAEVKKPGESLKISCKGSGHSFATFWIGWVRQVPGNGLELMGIINLGDSDTKYSPSFQGQVTISADESIGTAYLQWSSLKASDTAMYYCARVSLPHYYYYMDVWGKGTTVTVSS

SEQ ID NO: 954 - protein, 107 aa, Artificial Sequence
  Description of Artificial Sequence: Synthetic light chain variable region amino acid sequence
DIVMTQSPSSVSASVGDRVTITCRASQGISTWLAWYRQKPGKAPELLIYAASRLQSGVPSRFSGSGSGTDFTLTISSLQPEDFATYYCQQANSFLGAFGPGTKLEIK

SEQ ID NO: 955 - protein, 122 aa, Artificial Sequence
  Description of Artificial Sequence: Synthetic heavy chain variable region amino acid sequence
EVQLVESGGGLVKPGGSLRLSCAASGFTLSGYYMSWVRQAPGKGLEWISYISGGSTYTNYADSVNGRFTISRDNAKNSLYLQMDSLRAEDTAVYYCARLEYGDYGPYYLGLWGRGTLVTVSS

SEQ ID NO: 956 - protein, 112 aa, Artificial Sequence
  Description of Artificial Sequence: Synthetic light chain variable region amino acid sequence
QSVLTQPPSVSGAPGQRVTISCTGTSSNIGAGYDVHWYQKLPGTAPKLLIYANNNRPSGVPDRFSGSKSGTSASLAITGLQAEDEADYYCQSYDTSLSAHYVFGTGTKLTVL

SEQ ID NO: 957 - protein, 122 aa, Artificial Sequence
  Description of Artificial Sequence: Synthetic heavy chain variable region amino acid sequence
QVQLVQSGGGVVQPGRSLRLSCAASGFTFSDYGMHWVRQAPGKGLEWVAVIWFDGSNKNYADSVKGRFTISRDNSMNTLYLQMNNLRAEDTAVYYCARAPYSFWSGYYLDYWGQGSLVTVSS

SEQ ID NO: 958 - protein, 107 aa, Artificial Sequence
  Description of Artificial Sequence: Synthetic light chain variable region amino acid sequence
DIVMTQSPATLSVSPGERATLSCRASQSISSNLAWYQQKSGQAPRLLIYGASTRATGIPARFSGSGSGTEFTLTISSLQSEDFAVYSCQQYSKWPQTFGQGTKVEIK

SEQ ID NO: 959 - protein, 125 aa, Artificial Sequence
  Description of Artificial Sequence: Synthetic heavy chain variable region amino acid sequence
EVQLVESGGGLVKPGGSLRLSCAASQFTFSTYDMSWVRQAPGKGLEWVASISSGSTYIYYADSVKGRFTISRDNAKHSLFLQMKSLRAEDTALYYCARQVLYDRGGYYLYYFDHWGQGTLVTVSS

SEQ ID NO: 960 - protein, 107 aa, Artificial Sequence
  Description of Artificial Sequence: Synthetic light chain variable region amino acid sequence
DIQVTQSPSSLSASVGDRVTITCRASQTIASYLNWYQQKPGKAPNLLIYAASNLQSGVPSRFSGSGSGTEFTLTINTLQPEDFATYYCQQSYNFPYTFGQGTKVEIK

SEQ ID NO: 961 - protein, 120 aa, Artificial Sequence
  Description of Artificial Sequence: Synthetic heavy chain variable region amino acid sequence
QVQLQQWGAGLSKPSETLSVTCAVYGGSLSGHYWSWFRQPPGKGLEWIGEIDHSGSTTYNPSLKSRVTISVDTSKNQFSLKLTSVTAADTAMYYCARATRYNYGYTFDYWGQGTLVTVSS

SEQ ID NO: 962 - protein, 107 aa, Artificial Sequence
  Description of Artificial Sequence: Synthetic light chain variable region amino acid sequence
DIPLTQSPSSLSASVGDRVTITCRASQIISSYLNWYQQKPGKAPKLLIYAASTLQSGVPSRFSGSRSGTDFTLTISSLQPEDFASYYCQQSYIIPFTFGPGTKVEIK

SEQ ID NO: 963 - protein, 124 aa, Artificial Sequence
  Description of Artificial Sequence: Synthetic heavy chain variable region amino acid sequence
QVQLQESGPGLVKPSETLSLTCTVSGGSIGNNFYYWGWIRQPPGKGLEWIGSIYYSGTTYDNPSLKSRVTISVEPSKNQFSLKLSSVTAADTAVYHCARRYCDSTRCYEAFDIWGQGTTVTVSS

SEQ ID NO: 964 - protein, 111 aa, Artificial Sequence
  Description of Artificial Sequence: Synthetic light chain variable region amino acid sequence
SYELTQPPSASGTPGQRVTISCSGSSSNIGSNYVSWYQQLPGTAPKLLIYKNDQRPSGVPDRFSGSKSGTSASLAISGLRSEDEAEYYCAAWDDSLSGFYVFGTGTKVTVL

SEQ ID NO: 965 - protein, 116 aa, Artificial Sequence
  Description of Artificial Sequence: Synthetic heavy chain variable region amino acid sequence
QVQLVQSGGGLVQPGGSLRLSCVASGFIFSSYEMNWVRQAPGKGLEWVSYISSSGSTIYYADSVKGRFTISRDNAKNSLYLQMNSLGAEDTAVYYCARAILYFDYWGQGTLVTVSS

SEQ ID NO: 966 - protein, 107 aa, Artificial Sequence
  Description of Artificial Sequence: Synthetic light chain variable region amino acid sequence
GIRLTQSPSSLSASVGDRVTITCRASQSITNYINWYQQKPGKAPKLLIYAISRLQSGVPSRFSGSGSGTDFTLTISSLQPEDFATYYCQQSYSTMYTFGQGTKVEIK

SEQ ID NO: 967 - protein, 121 aa, Artificial Sequence
  Description of Artificial Sequence: Synthetic heavy chain variable region amino acid sequence
EVQLVESGPGLVKPSETLSLTCTVSGGSISTYYWSWIRQPPGKGLEWIGYIYYTGSTNYNPSLKSRVTISLDTSKNQFSLKLSSVSAADTAFYYCARSPPVPGTRSWFDPWGQGTLVTVSS

SEQ ID NO: 968 - protein, 110 aa, Artificial Sequence
  Description of Artificial Sequence: Synthetic light chain variable region amino acid sequence
SPGLTQPQSAFGTPGQRVTISCFGSSSNIGRNHIYWYQQVPGTAPKLLIYRNNQRPSGVPDRFFGSKFGTSASLAISGVRSEDEADYFCAAWDDSLSGPVFGGGTKLTVL

SEQ ID NO: 969 - protein, 127 aa, Artificial Sequence
  Description of Artificial Sequence: Synthetic heavy chain variable region amino acid sequence
EVQLVESGGGLVQPGGSLRLSCAASGFTFSSYNIAWVRQAPGKGLEWISYISSSSSVIYYADSVRGRFTISRDNAKNSLYLQMNSLRDEDTAMYYCARAGNDYNFWSGRSSEYFDYWGQGTLVTVSS

SEQ ID NO: 970 - protein, 108 aa, Artificial Sequence
  Description of Artificial Sequence: Synthetic light chain variable region amino acid sequence
DIVMTQSPATLSVSPGERATLSCRASQSVSSNLAWYQQKPGQAPRLLIYGASTRATGIPARFSGSGSGTEFTLTISSLQSEDFAVYYCQQYDNWPLYTFGQGTKLEIK

SEQ ID NO: 971 - protein, 124 aa, Artificial Sequence
  Description of Artificial Sequence: Synthetic heavy chain variable region amino acid sequence
EVQLVESGAEVKKPGESLKISCKGSGYSFTTYWIGWVRQMPGKGLEWMGIMYPGDSQTRYSPSFQGQVTISADKSISTAYLQWSSLKASDTAMYYCARGGYCSGGSCYRGLDYWGQGTLVTVSS

SEQ ID NO: 972 - protein, 107 aa, Artificial Sequence
  Description of Artificial Sequence: Synthetic light chain variable region amino acid sequence
EIVMTQSPSSLSASVGDRVTITCRASQSISSFLNWYQQKPGKAPNLLIYAASSLLSGVPSRFSGSGSGTDFTLTISSLQPEDFATYYCQQSHSTPQTFGQGTKLEIK

SEQ ID NO: 973 - protein, 119 aa, Artificial Sequence
  Description of Artificial Sequence: Synthetic heavy chain variable region amino acid sequence
QVQLVQSGAEVKKPGSSVKVSCKASGGTFSSYPIIWVRQAPGQGLEWMGRIIPILGIASYAQKFQGRVTITADKSTSTAYMELSSLRSEDTAVYYCARNSDFYYGMDVWGQGTTVTVSS

SEQ ID NO: 974 - protein, 110 aa, Artificial Sequence
  Description of Artificial Sequence: Synthetic light chain variable region amino acid sequence
QSALIQPASVSGSPGQSITISCTGTSSDVGGYNYVSWYQHHPGKAPKLMIYDVSNRPSGISNRFSGSKSGNTASLTISGLQAEDEADYYCSSYTSSSLYVFGTGTKVTVL

SEQ ID NO: 975 - protein, 125 aa, Artificial Sequence
  Description of Artificial Sequence: Synthetic heavy chain variable region amino acid sequence
EVQLVESGGGLVQPGGSLRLSCAASGFTFSTFEFNWVRQAPGKGLEWLSYISSDDTTRYYADSVKGRFTISRDNAKNSLYLQMNSLRAEDTAYYYCVRGGPYDYVWGTYRYFDFWGQGTLVTVSS

SEQ ID NO: 976 - protein, 110 aa, Artificial Sequence
  Description of Artificial Sequence: Synthetic light chain variable region amino acid sequence
QSVLTQPASVSGSPGQSITISCTGTSSDIGGYNYVSWYQQHPGKAPKLMIYDVTNRPLGVSNRFSGSKSGNTASLIISGLQAEDEAEYYCCSYTSSNSLVFGGGTKLTVL

SEQ ID NO: 977 - protein, 128 aa, Artificial Sequence
  Description of Artificial Sequence: Synthetic heavy chain variable region amino acid sequence
EVQLVQSGAEVKKPGSSVKVSCKASGVTGGTFSSYAISWVRQAPGQGLEWMGGIMPMFGTTNYAQKFQGRVTITADKSTSTAYMELSSLRSEDTAVYYCARDYRDFSPHLDYYYMDVWGKGTTVTVSS

SEQ ID NO: 978 - protein, 108 aa, Artificial Sequence
  Description of Artificial Sequence: Synthetic light chain variable region amino acid sequence
DIRLTQSPGTLSLSPGERATLSCRASQSVSTSYLAWYQQKPGQAPRLLIYGASNRATGIPDRFSGSGSGTDFTLTISRLEPEDFAVYYCQQYGRTSWTFGQGTKVDIK

SEQ ID NO: 979 - protein, 117 aa, Artificial Sequence
  Description of Artificial Sequence: Synthetic heavy chain variable region amino acid sequence
QVQLVQSGGGVVQPGRSLRLSCAASGFPFHSYAMHWVRQAPGKGLEWVAVIWYEGSEKHYADSVQGRFTISRDNSKNMLYLQMNNLRVADTAVYYCARRGAWGFDIWGQGTTVTVSS

SEQ ID NO: 980 - protein, 112 aa, Artificial Sequence
  Description of Artificial Sequence: Synthetic light chain variable region amino acid sequence
DIVMTQTPLSLPVTPGEPASISCRSSQSVLHSTGYNSLDWYLQKPGQSPQLLIFLGSNRASGVPDRFSGSGSGTDFTLKISRVEAEDVGVYYCMQGLQTPYTFGQGTKVEIK

SEQ ID NO: 981 - protein, 125 aa, Artificial Sequence
  Description of Artificial Sequence: Synthetic heavy chain variable region amino acid sequence
QVQLVQSGGDLVQPGGSLRLSCAASGFTFSDYEVNWVRQAPGKGLEWLSYISSSGRIIHYADSVRGRFTISRDNAKNSLYLQMNSLRAEDTAVYYCARAAGQWLVTYYYYGMDVWGQGTTVTVSS

SEQ ID NO: 982 - protein, 107 aa, Artificial Sequence
  Description of Artificial Sequence: Synthetic light chain variable region amino acid sequence
QSVMTQSPSTLSASVGDTVTITCRASQSIINRLAWYQQKPGKPPKLLIYKSSSSESGVPSKFSGSGSGTEFTLTINSLQPDDFATYYCQHYNSYLYTFGQGTKVEIK

SEQ ID NO: 983 - protein, 116 aa, Artificial Sequence
  Description of Artificial Sequence: Synthetic heavy chain variable region amino acid sequence
EVQLVETGAEVKKPGESLKISCKGSGYSFTSYWIGWVRQMPGKGLEWMGIIYPGDSDTRYSPSFQGQVTISADKSISTAYLQWSSLKASDTAMYYCARRYDYIDIWGQGTMVTVSS

SEQ ID NO: 984 - protein, 108 aa, Artificial Sequence
  Description of Artificial Sequence: Synthetic light chain variable region amino acid sequence
DIRVTQSPSSLSASVGDRVTITCQASQDISNYLNWYQQKPGKAPKLLIYDASNLETGVPSRFSGSGSGTDFTFTISSLQPEDIATYYCQQYDNLAHITFGPGTKVEIK

SEQ ID NO: 985 - protein, 121 aa, Artificial Sequence
  Description of Artificial Sequence: Synthetic heavy chain variable region amino acid sequence
EVQLVQSGAEVKKPGASVKVSCKTSGYTFTGDYLHWVRQAPGQGLEWMGRLNPKSGGTVYAQRFQGRVTMTGDTSVTTAYMQLTRLRSDDTAIYYCARGIPVSGPVSIDYWGQGTLVTVSS

SEQ ID NO: 986 - protein, 110 aa, Artificial Sequence
  Description of Artificial Sequence: Synthetic light chain variable region amino acid sequence
QSVLTQPASLSGSPGQSITISCTGTSSDVGGYGYVSWYQQHPGKAPKLMIYDVANRPSGVSHRFSGSKSGNTASLTISGLQADDEADYYCSSYTRSNTVVFGGGTKLTVL

SEQ ID NO: 987 - protein, 120 aa, Artificial Sequence
  Description of Artificial Sequence: Synthetic heavy chain variable region amino acid sequence
EVQLVETGGGVVQPGRSLRLSCAASGFTFSSYGMHWVRQAPGKGLEWVAVISYDGSNKYYADSVKGRFTISRDNSKNTLYLQMNSLRTEDTAVYYCAKGGGYYYYYMDVWGKGTTVTVSS

SEQ ID NO: 988 - protein, 110 aa, Artificial Sequence
  Description of Artificial Sequence: Synthetic light chain variable region amino acid sequence
QPVLTQPASVSGSPGQSITISCTGTSSDVGGYNYVSWYQQHPGKAPKLMIYGVNNRPSGVSNRFSGSKSGNTASLTISGLQGEDEADYYCNSYRSGITVVFGGGTKLTVL

SEQ ID NO: 989 - protein, 127 aa, Artificial Sequence
  Description of Artificial Sequence: Synthetic heavy chain variable region amino acid sequence
EVQLVESGAEVKKPGESLKISCEAFGYSFTSYWIGWVRQVPGRGLEWIGVIYPGDSDIRYTPSFRGQVTISADRSISTAYLQWNNLKASDTAMYYCARPGRDINYYHSRDYGALDIWGQGTTVTVSS

SEQ ID NO: 990 - protein, 114 aa, Artificial Sequence
  Description of Artificial Sequence: Synthetic light chain variable region amino acid sequence
DIQLTQSPDSLAVSLGERVTINCKSSQSFLYSSNNKNYLAWYQQKPGQPPKLLIYWASVRESGVPDRFSGSGSGTDFTLTISSLQAEDVAVYYCQEYYSPPMFTFGQGTKVEIK

SEQ ID NO: 991 - protein, 119 aa, Artificial Sequence
  Description of Artificial Sequence: Synthetic heavy chain variable region amino acid sequence
EVQLLESGGGLIQPGGSLRLSCAASGFTFNNYVMSWVRQAPGKGLEWVAAISSSGVSTYYAASVKGRFTISRDNSKNMLYVQLNSLRAEDTAVYYCAKETGSYYYFDSWGQGTLVTVSS

SEQ ID NO: 992 - protein, 107 aa, Artificial Sequence
  Description of Artificial Sequence: Synthetic light chain variable region amino acid sequence
ETTLTQSPSTLSGSVGDRVTITCRASESISSWLAWYQQKPGKAPKLLIYKASNLESGVPSRFSGSGSGTEFTLTISSLQPDDFATYYCQQYNSYLITFGQGTRLEIK

SEQ ID NO: 993 - protein, 124 aa, Artificial Sequence
  Description of Artificial Sequence: Synthetic heavy chain variable region amino acid sequence
EVQLVESGPGLVKPSQTLSLTCTVSGGSISSGGDYWSWVRQRPGKGLEWIGYIYNSGSGYYNPSLKNRVSMSMHTSRNQFSLRLSSVTAADTAFYYCARDPFYRSGGIHYFDYWGQGALVTVSS

SEQ ID NO: 994 - protein, 108 aa, Artificial Sequence
  Description of Artificial Sequence: Synthetic light chain variable region amino acid sequence
DIVLTQTPGTLSLSPGEGATLSCRASPSVGSTSLAWYQQKPGQAPRLLIYGASSRATGIPDRFSGSGSGTDFTLTISRLEPEDFAVYYCQQDGGLPITFGLGTRLEIK

SEQ ID NO: 995 - protein, 127 aa, Artificial Sequence
  Description of Artificial Sequence: Synthetic heavy chain variable region amino acid sequence
EVQLLESGGGLVQPGGSLRLSCSASGFTFSVYAMHWVRLAPGKGLEYVSTISGNGGSTYYGDSVKGRFTTSRDNSKNTVYLQMSSLRAEDTAVYYCVKAPARDHYEILTLLGYFDYWGQGTLVTVSS

SEQ ID NO: 996 - protein, 114 aa, Artificial Sequence
  Description of Artificial Sequence: Synthetic light chain variable region amino acid sequence
DIVMTQSPDSLAVSLGERATINCKSSQSVLYSSSNKNYLAWYQQKPGQPPKLLIYWASTRESGVPDRFSGSGSGTDFTLTISSLQAEDVAVYYCQQYYTIPPWTFGQGTKVEIK

SEQ ID NO: 997 - protein, 122 aa, Artificial Sequence
  Description of Artificial Sequence: Synthetic heavy chain variable region amino acid sequence
QVQLVQSGAEMKKPGSSAKVSCKASGGTLSSYAINWVRQAPGQGLEWMGGIIPIFGTTKYAPKFQDRVTITVDESTSTAYMELSSLRSEDTAVYYCSRESSTWDVAHYFDYWGQGTLVTVSS

SEQ ID NO: 998 - protein, 107 aa, Artificial Sequence
  Description of Artificial Sequence: Synthetic light chain variable region amino acid sequence
DIVMTQTPSAISASVGDRVTITCRASQGISNYLAWVQQKPGKVPKRLIYGASSLQSGVPSRFSGSGSGTEFTLTISSLQPEDFATYYCLQHNSYPYTFGQGTKVEIK

SEQ ID NO: 999 - protein, 126 aa, Artificial Sequence
  Description of Artificial Sequence: Synthetic heavy chain variable region amino acid sequence
EVQLVESGAEVEKPGASVKVSCKASGYTFINYDIIWVRQAPGQGLEWMGWISGYKGNTNYAQKLQGRITMSTDTSTRTAYMELRSLTSDDTAVYYCARVGGTARSTTPYYYGMDVWGQGTTVTVSS

SEQ ID NO: 1000 - protein, 108 aa, Artificial Sequence
  Description of Artificial Sequence: Synthetic light chain variable region amino acid sequence
SYVLTQPPSVSVSPGQTARITCSGDAVPKQFSYWYQQKPGQAPVLVIYKDIERPSGIPERFSGSSSGTTVTLTISGVQAEDEADYYCQSAHTSGTYHVFGTGTKLTVL

SEQ ID NO: 1001 - protein, 117 aa, Artificial Sequence
  Description of Artificial Sequence: Synthetic heavy chain variable region amino acid sequence
EVQLLESGGGVVQPGRSLRLSCATSGFTFSSYGMHWVRQAPGKGLEWVAVIYYEGSNKYYGDSVKGRFTISRDNSKSTLYLQMNRLRAEDTAVYYCARRPAGGFDYWGPGTLVTVSS

SEQ ID NO: 1002 - protein, 112 aa, Artificial Sequence
  Description of Artificial Sequence: Synthetic light chain variable region amino acid sequence
EIVMTQSPLSLPVTPGEPASISCRSSQNLLNSNGYNYLDWYLQKPGQSPQLLIYLGSNRASGVPDRFSGSGSGTDFTLKISRVEAEDVGVYYCMQALQTPYTFGQGTKLEIK

SEQ ID NO: 1003 - protein, 129 aa, Artificial Sequence
  Description of Artificial Sequence: Synthetic heavy chain variable region amino acid sequence
EVQLVESGPGLVKPSETLSLTCTVSGGSIGNDYYYWGWIRQPPGKGLEWIGNISYSGSTYYNPSLKSRVTISVGTSKNQFSLKLTSVSAADTAVYHCVGRTFWRDCSSTSCYEYYFDYWGQGTLVTVSS

SEQ ID NO: 1004 - protein, 107 aa, Artificial Sequence
  Description of Artificial Sequence: Synthetic light chain variable region amino acid sequence
ETTLTQSPTSLSASVGDRVTITCRASQGISNYLAWYQQKPGKVPKVLIYAASTLQSGVSSRFSGSGSGTGFTLTISNLQPEDVATYYCQNYNSAPWTFGQGTKVEIK

SEQ ID NO: 1005 - protein, 130 aa, Artificial Sequence
  Description of Artificial Sequence: Synthetic heavy chain variable region amino acid sequence
QVQLVQSGAEVKKPGASVKVSCKASGYMFTGYYMHWVRQAPGQGLEWMGRINPNSGGTNYAQKFQGRVTMTRDTSISTGYMELSRLRSDDTAVYFCARDFFPLVIPTLIVGRGLYDMDVWGQGTMVTVSS

SEQ ID NO: 1006 - protein, 110 aa, Artificial Sequence
  Description of Artificial Sequence: Synthetic light chain variable region amino acid sequence
QPGLTQPPSASGTPGQRVTISCSGRSSNIGSNTVNWYQQLQGTAPKLLIYKNNQRPSGVPDRFSGSKSGTSASLAISGLQSEDEADYYCAAWDDSLNGVVFGGGTKVTVL

SEQ ID NO: 1007 - protein, 126 aa, Artificial Sequence
  Description of Artificial Sequence: Synthetic heavy chain variable region amino acid sequence
QVQLVESGAEVKKPGASVKVSCKASGYTFTDYYMHWVRQAPGQGLEWMGRINPNSGGTNYAQKFQGRVTMTRDTSISTAYMELSSLRSDDTAVYYCARDLTAGGYGSTWYSCGDYWGQGTLVTVSS

SEQ ID NO: 1008 - protein, 108 aa, Artificial Sequence
  Description of Artificial Sequence: Synthetic light chain variable region amino acid sequence
EIVLTQSPATLSVSPGERATLSCRASQSVSSNLAWYQQKPGQAPRLLIYGASTRATGIPARFSGSGSGTEFTLTISSLQSEDFAVYYCQQYNNWPRWTFGQGTKVEIK

SEQ ID NO: 1009 - protein, 118 aa, Artificial Sequence
  Description of Artificial Sequence: Synthetic heavy chain variable region amino acid sequence
QVQLVQSGAEVKKPGSSVKISCKASGGTFSSHPISWVRQAPGQGLEWMGRIVPIFGIANYAQKFQGRVTMIADKSTNTAYMELSNLRSEDTAVYYCANPVYDSSGFQWGQGTLVTVSS

SEQ ID NO: 1010 - protein, 110 aa, Artificial Sequence
  Description of Artificial Sequence: Synthetic light chain variable region amino acid sequence
QPVLTQPRSVSGSPGQSVTISCTGTSGDGGFYNYVSWYQQHPGKTPKLMIYDVDQRPSGVPDRFSGSKSGNTASLTISGLQAEDEADYYCCSYPGNPLYVFGTGTKVTVL

SEQ ID NO: 1011 - protein, 119 aa, Artificial Sequence
  Description of Artificial Sequence: Synthetic heavy chain variable region amino acid sequence
EVQLVQSGGGLVKPGGSLRLSCAASGFTFIDYYMSWIRQAPGKGLEWVSSISGGSTYTTYADSVKGRFTISRDNGKNSLYLQMDSLRAEDTAVYYCARLGGYSYYMDVWGKGTTVTVSS

SEQ ID NO: 1012 - protein, 110 aa, Artificial Sequence
  Description of Artificial Sequence: Synthetic light chain variable region amino acid sequence
QPVLTQPPSVSGAPGQRVTISCTGSSSNIGAGYDVHWYQHLPGAAPKLLIYDNTNRPSGIPDRFSGSKSGTSASLAITGLQAEDEADYYCQSYDSSLDWVFGGGTKVTVL

SEQ ID NO: 1013 - protein, 125 aa, Artificial Sequence
  Description of Artificial Sequence: Synthetic heavy chain variable region amino acid sequence
QVQLVQSGAEVKKPGSSVKVSCKASGGSFSSYTLNWVRQAPGQGLEWMGRFVPIVGIANYAQKFQGRVTITADKSTSTVYMELSSLRSEDTAVYYCATAPTAYCSGDCYSLFDPWGQGTLVTVSS

SEQ ID NO: 1014 - protein, 112 aa, Artificial Sequence
  Description of Artificial Sequence: Synthetic light chain variable region amino acid sequence
QSVLIQPASVSGSPGQSITISCTGISSDVGSYNLVSWYQQHPGKAPKLIIYEVNKRPSGVSNRFSGSKSGNTASLTISGLQAEDEADYYCCSYAVSRTSLYVFGTGTKVTVL

SEQ ID NO: 1015 - protein, 120 aa, Artificial Sequence
  Description of Artificial Sequence: Synthetic heavy chain variable region amino acid sequence
QVQLVQSGAEVKKPGESLKISCQGSGYSFTSYWIGWVRQMPGKDLEWMGIIYPSDSDTRYSPSFQGQVTISVDKSINTAYLQWTSLKASDTAMYYCARCDGAVYWYFDLWGRGTLVTVSS

SEQ ID NO: 1016 - protein, 109 aa, Artificial Sequence
  Description of Artificial Sequence: Synthetic light chain variable region amino acid sequence
EIVLTQSPATLSVSPGERVTLSCRASRSVSSHLAWYQQKPGQAPRLLMYGASTRATGIPARFSGSGSGTEFTLTISSLQSEDFGVYYCQQYNNWPPALTFGGGTKLEIK

SEQ ID NO: 1017 - protein, 125 aa, Artificial Sequence
  Description of Artificial Sequence: Synthetic heavy chain variable region amino acid sequence
QVQLQESGAGLVKPSETLSLTCGVYGESFSGHSWSWIRQPPGRGLEWIGEINQSGTTKYNPSLRSRVTISVDRSKNEFSLKVSSVTAADTAVYFCARYFRSFYTIGPDYYYMDVWGKGTTVTVSS

SEQ ID NO: 1018 - protein, 108 aa, Artificial Sequence
  Description of Artificial Sequence: Synthetic light chain variable region amino acid sequence
EIVLTQSPSSLSASVGDRVTITCRASQNINNYLNWYQQKPGKAPRLLIYAASSLQSGVPSRFTGSGSGTDFTLTIRSLQSEDFATYYCQHSYSSSLLTFGGGTKVDIK

SEQ ID NO: 1019 - protein, 125 aa, Artificial Sequence
  Description of Artificial Sequence: Synthetic heavy chain variable region amino acid sequence
EVQLLETGGGLVQPGGSLRLSCAASGFTFSSYDMNWVRQAPGKGLEWVSTISGSGGPTYYAGSVKGRFTISRDNSKNTLYLQMNSLRADDTAVYYCAKAQLYDTSGYYLYYFDYWGQGTLVTVSS

SEQ ID NO: 1020 - protein, 107 aa, Artificial Sequence
  Description of Artificial Sequence: Synthetic light chain variable region amino acid sequence
DIRMTQSPSSLSASVGDRVTITCRASQRITSYLNWYQQKPGKAPKLLIYAASSLQSGVPSRFSGSGSGTDFTLTISSLQPEDFATYFCQQSYSTSFTFGPGTKVDIK

SEQ ID NO: 1021 - protein, 125 aa, Artificial Sequence
  Description of Artificial Sequence: Synthetic heavy chain variable region amino acid sequence
QVQLQQWGAGLLKPSETLSLTCAVYGGSFSSYYYSWIRQPPGKGLEWIGEINQSGSTNYNPSLKSRVTISVDTSKNEFSLKLSSVTAADTAVYYCARIVREFNTRWYDYYYMDVWGKGTTVTVSS

SEQ ID NO: 1022 - protein, 110 aa, Artificial Sequence
  Description of Artificial Sequence: Synthetic light chain variable region amino acid sequence
DIRVTQSPATLSLSPGERATLSCRTSQSISSSYLAWYQQKFGQAPRLLIYGASSRATGIPDRFSGSGSGTDFTLTISRLEPEDFAVYYCQQYGISPPMYTFGQGTKVEIK

SEQ ID NO: 1023 - protein, 119 aa, Artificial Sequence
  Description of Artificial Sequence: Synthetic heavy chain variable region amino acid sequence
EVQLLESGAEVKKPGESLKISCKGSGYSFSSYWIAWVRQMPGKGLEWMGIIYPSDSDTKYSPSFQGQVTISADKSISTAYLQWSSLKASDTAMYYCARQAGIQRPLDYWGQGTLVTVSS

SEQ ID NO: 1024 - protein, 108 aa, Artificial Sequence
  Description of Artificial Sequence: Synthetic light chain variable region amino acid sequence
EIVMTQSPATLSVSPGERATLSCRASQSVRSNLAWYQQKPGQAPRLLIYDASTRATGISARFSGSGSGTEFTLTISSLQSEDFAVYYCQQFHNWPPYTFGQGTKVEIK

SEQ ID NO: 1025 - protein, 124 aa, Artificial Sequence
  Description of Artificial Sequence: Synthetic heavy chain variable region amino acid sequence
QVQLQQWGAGLLKSSETLSLTCAVYGGSFSGYYWSWIRQSPGKGLEWIGEINHSGSANYNPSLKNRVTISRDTSKNQFSLWLSSVTAADTAVYYCARTSRSPEPDNYYYYMDVWGRGTTVTVSS

SEQ ID NO: 1026 - protein, 111 aa, Artificial Sequence
  Description of Artificial Sequence: Synthetic light chain variable region amino acid sequence
QSVLTQPPSVSGAPGQRVSISCTGSSSDIGAGYDVHWYQQFPGTAPKLLMYANNNRPSGVPDRFSGSRSGTSASLAITGLQAEDEADYYCQSYDSNLDVVVFGGGTKLTVL

SEQ ID NO: 1027 - protein, 130 aa, Artificial Sequence
  Description of Artificial Sequence: Synthetic heavy chain variable region amino acid sequence
QVQLVESGGGLVKPGGSLRLSCAASGFTFSSYSMNWVRQAPGKGLEWVSSMSSSSGYIDYADSVKGRFTISRDNAKNSLYLQMNSLRVEDTAVYYCARRNAVVVPSLMVVADYYYGMDVWGQGTTVTVSS

SEQ ID NO: 1028 - protein, 113 aa, Artificial Sequence
  Description of Artificial Sequence: Synthetic light chain variable region amino acid sequence
QSVLTQPPSVSGAPGQRVTISCTGSSSNIGAGYDVHWYQQLPGTAPKLLIYGNSNRPSGVPDRFSGSKSGTSASLAITGLQAEDEADYYCQSYDTSLSGPGYVFGTGTKLTVL

SEQ ID NO: 1029 - protein, 126 aa, Artificial Sequence
  Description of Artificial Sequence: Synthetic heavy chain variable region amino acid sequence
QVQLVQSGAEVKKPGASVKVSCKAFGYTFRSYDMQWVRQAPGQRLEWMGWINAVNGDTKYSQKFQGRVTITRDTSATTVYMELSSLRSEDTAVYYCARWGRFWNSRSLDYYAMDVWGQGTTVTVSS

SEQ ID NO: 1030 - protein, 108 aa, Artificial Sequence
  Description of Artificial Sequence: Synthetic light chain variable region amino acid sequence
DIVMTQSPGTLSLSPGERATLSCRASQSISSSYLVWYQHKPGQAPRLLIYGASTRATDIPDRFSGSGSGTDFTLTISRLEPEDFAVYYCQQYGSSPLTFGQGTRLEIK

SEQ ID NO: 1031 - protein, 122 aa, Artificial Sequence
  Description of Artificial Sequence: Synthetic heavy chain variable region amino acid sequence
QVQLVQSGAEVKRPGASVKVSCKASGYIFSHYGISWVRQAPGQGLEWMAWISAYNGNTNYAQKLQGRVTVTTDTSTSTAYMELRSLRSDDTAVYYCAREPPSLSAAATLDYWGQGTLVTVSS

SEQ ID NO: 1032 - protein, 112 aa, Artificial Sequence
  Description of Artificial Sequence: Synthetic light chain variable region amino acid sequence
EIVMTQSPLSLPVTLGQPASISCRSNQSLVYSDGNIYLSWFQQRPGQSPRRLIYKVSNRDSGVPDRFSGSGSGTDFTLKISRVEAEDVAVYYCMQVTHWPHEFGQGTKLEIK

SEQ ID NO: 1033 - protein, 125 aa, Artificial Sequence
  Description of Artificial Sequence: Synthetic heavy chain variable region amino acid sequence
QVQLVQSGAEVKKPGASVKVSCRTSGYTFTDYEINWVRQAPGQGLEWMGGISAYNGKTDYAQNLQDRVTMTTDTSTSTAYMELRSLRSDDTAVYYCARIFYYDRSGYYLALFDSWGHGTLVTVSS

SEQ ID NO: 1034 - protein, 108 aa, Artificial Sequence
  Description of Artificial Sequence: Synthetic light chain variable region amino acid sequence
DIQMTQSPSSLSASVGDRVTITCRASQRIASYLNWYQQKPGKAPKLLIYAASSLQSGVPSRFSGSGSGTDFTLTISSLQPEDFATYYCQQSYSTPTLTFGGGTKMDIK

SEQ ID NO: 1035 - protein, 122 aa, Artificial Sequence
  Description of Artificial Sequence: Synthetic heavy chain variable region amino acid sequence
EVQLVESGGGLVKPGMSLRLSCAASGFRFSDHYMNWIRQAPGKGLEWVSYISSSSTYTDYTDSVKGRFTISRDNSKNSVYLQMNSLRAEDTAIYYCARVAPIRHNGDYIDYWGQGTTVTVSS

SEQ ID NO: 1036 - protein, 111 aa, Artificial Sequence
  Description of Artificial Sequence: Synthetic light chain variable region amino acid sequence
NFMLTQPPSASGTPGQRVTISCTGSSSNIGAGYDVHZYQQIPGTAPKLLIYGNNNRPSGVPDRFSGSKSGTSASLAITGLQTEDEADYYCQSYDRGLSGRVFGTGTKVTVL

SEQ ID NO: 1037 - protein, 123 aa, Artificial Sequence
  Description of Artificial Sequence: Synthetic heavy chain variable region amino acid sequence
QVQLQESGPGLVKPSQMLSLTCTVSGDSISSGDYYWSWIRHHPGKGLEWIGYISYSGSTYNNPSLKSRVTVSVDTSKNQFFLKLTSVTAADTAVYYCARATKPYHSYFYMDVWGKGTTVTVSS

SEQ ID NO: 1038 - protein, 107 aa, Artificial Sequence
  Description of Artificial Sequence: Synthetic light chain variable region amino acid sequence
EIVLTQSPGTLSLSPGERATLSCRASQSGSRSYLAWYQQRPGQAPRLLIYGASNRATGIPDRFSGSGSGTDFTLTISRLEPEDFAVYYCQQYGNAPTFGGGTKVDIK

SEQ ID NO: 1039 - protein, 131 aa, Artificial Sequence
  Description of Artificial Sequence: Synthetic heavy chain variable region amino acid sequence
EVQLVESGGGLVQPGGSLRLSCIVSGFPFNTYAMSWVRQAPGKGLEWVSVVSASGGNTDYADSVKGRFTISRDNSKKTLYLQMNSLRAEDTAVYYCARTESNTLAPSWSGRYVTDWYFDLWGRGTLVTVSS

SEQ ID NO: 1040 - protein, 106 aa, Artificial Sequence
  Description of Artificial Sequence: Synthetic light chain variable region amino acid sequence
EIVMTQSPSSLSASVGDRVTITCRASQSISSFLNWYQQKPGKAPKLLISAASSLQSGVPSRFSGSGSGTDFTLTISSLQPEDFATYYCQQSYSIPTFGQGTRLEIK

SEQ ID NO: 1041 - protein, 126 aa, Artificial Sequence
  Description of Artificial Sequence: Synthetic heavy chain variable region amino acid sequence
QVQLVQSGAEVKKPGASVKVSCKASGYTFSGYYMHWVRQAPGQGLEWVGRINPKSGDTVYAQKFQGRVTMTRDTSISTAYMELSRLISDDTAKYYCARQEDHYYGSGNFYNSFDFWGQGTLVTVSS

SEQ ID NO: 1042 - protein, 108 aa, Artificial Sequence
  Description of Artificial Sequence: Synthetic light chain variable region amino acid sequence
ETTLTQSPSSLSASVGDRVTITCRASQSISSNLNWYQQKPGKAPKLLIYGASTLQSGVPSRFSGSGSGTDFTLTISSLQPEDLATYYCQQSYSNPGKTFGQGTKVDIK

SEQ ID NO: 1043 - protein, 129 aa, Artificial Sequence
  Description of Artificial Sequence: Synthetic heavy chain variable region amino acid sequence
EVQLVQSGGVVIQPGGSLRLSCAASGFSFDEYLMHWVRQLPGKGLEWVALISWHGDITYYADSVKGRFTISRDNSRYSLYLQMNSLRSDDTALYYCVKDGWIEGAFNHTFGIGYYFENWGQGTLVTVSS

SEQ ID NO: 1044 - protein, 107 aa, Artificial Sequence
  Description of Artificial Sequence: Synthetic light chain variable region amino acid sequence
DIVLTQTPSSLSASVGDRVTITCQASQDINNCLNWYQQKPGKAPEVLIFDASNLETGVPLRFSGSGSGTHFTLTISSLQPEDIATYYCQQHENVPLTFGGGTKVEIK

SEQ ID NO: 1045 - protein, 124 aa, Artificial Sequence
  Description of Artificial Sequence: Synthetic heavy chain variable region amino acid sequence
QVQLVESGGGLVKPGGSLRLSCGASGFTFPDYYMSWIRQAPGKGLEWLSYISSSSSFTDYADSVKGRFTISRDNAKKSLYLQMNSLRAEDTAVYYCARVRADYVGNSRIHFDYWGQGTLVTVSS

SEQ ID NO: 1046 - protein, 107 aa, Artificial Sequence
  Description of Artificial Sequence: Synthetic light chain variable region amino acid sequence
DIVMTQSPVTLSVSPGERATLSCRASQSLNGYLAWYQQKPGQAPRLLIYGASTRATEPGWDTSGRGSGTEFTLTISSLQSEDFAVYYCQQYNDWPFTFGQGTRLEIK

SEQ ID NO: 1047 - protein, 123 aa, Artificial Sequence
  Description of Artificial Sequence: Synthetic heavy chain variable region amino acid sequence
EVQLLESGGGLVKPGGSLRLSCAASGLTFSDHDMSWVRQAPGKGLEWVSGIGGSGSNTYYAGSVKGRFTISRDNSKNTLYLQMDSLRVEDTAVYYCAKDPYGDYRDYYGMDVWGQGTTVTVSS

SEQ ID NO: 1048 - protein, 112 aa, Artificial Sequence
  Description of Artificial Sequence: Synthetic light chain variable region amino acid sequence
DIVLTQTPFSLPVTPGEPASISCRSSQSLLKSNGYNYLDWFLQKPGQSPQLLIYLGSNRASGVPDRFSGSGSGTDFTLKISRVEAEDVGVYYCMQTLQALYTFGQGTKVEIK

SEQ ID NO: 1049 - protein, 123 aa, Artificial Sequence
  Description of Artificial Sequence: Synthetic heavy chain variable region amino acid sequence
EVQLLESGGGLVQPGGSLRLSCAASGFAFDIYSMNWVRQAPGKGLEWLSYISSRGETIYYADSVKGRFTISRDNARNSLYLQMNGLRDEDTATYYCYYYGSGISSHGGAFDYWGQGTLVTVSS

SEQ ID NO: 1050 - protein, 108 aa, Artificial Sequence
  Description of Artificial Sequence: Synthetic light chain variable region amino acid sequence
DIVMTQTPATLSLSPGERATLTSRASQSVSSFLAWYQQKPGQAPRLLIYDVSNRATGVPARFSGSGSGTDFTLTISSLEPEDIAVYYCQQRNTWPAITFGQGTKVEIK

SEQ ID NO: 1051 - protein, 118 aa, Artificial Sequence
  Description of Artificial Sequence: Synthetic heavy chain variable region amino acid sequence
QVQLVESGAEVKKPGSSVKISCKASGGTFSSHPISWVRQAPGQGLEWMGRIVPIFGIANYAQKFQGRVTMIADKSTNTAYMELSNLRSEDTAVYYCASPVYDSSGFQWGQGTLVTVSS

SEQ ID NO: 1052 - protein, 110 aa, Artificial Sequence
  Description of Artificial Sequence: Synthetic light chain variable region amino acid sequence
QSALIQPRSVSGSPGQSVTISCTGTSGDGGFYNYVSWYQQHPGKTPKLMIYDVDQRPSGVPDRFSGSKSGNTASLTISGLQAEDEADYYCCSYPGNPLYVFGTGTKLTVL

SEQ ID NO: 1053 - protein, 121 aa, Artificial Sequence
  Description of Artificial Sequence: Synthetic heavy chain variable region amino acid sequence
QVQLVQSGAEVRKPGESLKISCKASGYRFTNYWIGWVRQMPGKGLEWMGVIYPGDSDTRYSPSFQGQVTMSADKSTNTAYLQWSSLKASDTAIYYCVSLYSDYDYGALDYWGQGTLVTVSS

SEQ ID NO: 1054 - protein, 108 aa, Artificial Sequence
  Description of Artificial Sequence: Synthetic light chain variable region amino acid sequence
EIVMTQSPATLSVSPGERATLSCRASENVGRNLAWYQQKPGQAPRLLIYGASIRATGILARFSGSGSGTEYTLTISSLQSEDFAVYYCQQYHDWPSFTFGPGTKVDIK

SEQ ID NO: 1055 - protein, 121 aa, Artificial Sequence
  Description of Artificial Sequence: Synthetic heavy chain variable region amino acid sequence
EVQLLESGGGLVKPGGSLRLSCAASGFTFSSYSMNWVRQAPGKGLEWVSSISAGSSYIYYADSVKGRFTISRDNAKNSLYLQMNSLRAEDTAVYYCARVPSYETTPYFDYWGQGTLVTVSS

SEQ ID NO: 1056 - protein, 111 aa, Artificial Sequence
  Description of Artificial Sequence: Synthetic light chain variable region amino acid sequence
QSVLTQPPSVSGAPGQRVTISCTGSSSNIGSGYDLHWYQQLPGTAPKLLIYVNSNRPSGVPDRFSGSKSGTSASLAITGLQAEDEADYYCQSYDSSLSGYVFGTGTKVTVL

SEQ ID NO: 1057 - protein, 125 aa, Artificial Sequence
  Description of Artificial Sequence: Synthetic heavy chain variable region amino acid sequence
QVQLQESGPGLVKPSGTLSLTCAVSGGSISSTNWWSWVRQPPGKGLEWIGEIYHSGSTNYNPSLKSRVTISVDKSNNQFSLNLSSVTAADTAVYYCARGVITYRGSWFLQYFDYWGQGTLVTVSS

SEQ ID NO: 1058 - protein, 113 aa, Artificial Sequence
  Description of Artificial Sequence: Synthetic light chain variable region amino acid sequence
DIRVTQSPDSLAVSLGERATINCKSSQSLFYSSNNQNYLAWYQQKPGQPPKLLIYWASTRQSGVPHRFSGSGSGTDFTLTISSLQAEDVAVYYCQQYYSSPLTFGGGTKVEIK

SEQ ID NO: 1059 - protein, 125 aa, Artificial Sequence
  Description of Artificial Sequence: Synthetic heavy chain variable region amino acid sequence
EVQLLESGGGLVKPGGSLRLSCAGSGFSFSSYSMNWVRQAPEKGLEWVSSISASSSFINYADSVKGRFIISRDNAKNSLFLQMDSLRAEDTAVYYCARDGVHPGGYIFGGYIDSWGQGTLVTVSS

SEQ ID NO: 1060 - protein, 111 aa, Artificial Sequence
  Description of Artificial Sequence: Synthetic light chain variable region amino acid sequence
QSVLTQPPSVSGAPGQRVTISCTGSSSNIGAGYDVHWFRQLPGTAPKLLIYGNNNRPSGVPDRFSGSKSGSSASLIITGLQAQDEATYYCQSYDSSLSGYVFGTGTKLTVL

SEQ ID NO: 1061 - protein, 127 aa, Artificial Sequence
  Description of Artificial Sequence: Synthetic heavy chain variable region amino acid sequence
QVQLVQSGPALVKPTQTLTLTCTFSGFSLSTKGMCVSWIRQPPGKALEWLALIDWDDDKFYSTSLKTRLTISKDTSKNQVVLTMTNMDPVDTATYYCARTLYFYGSGSLSDYCFDYWGQGTPVTVSS

SEQ ID NO: 1062 - protein, 110 aa, Artificial Sequence
  Description of Artificial Sequence: Synthetic light chain variable region amino acid sequence
QPVLTQPRSVSGSPGQSVTISCTGTSRDVGNYNFVSWYQQHPGKAPKLIIYDVTKRPSGVPDRFSGSKSGNTASLTISGLQAEDEADYYCCSYAGTYTWVFGGGTKVTVL

SEQ ID NO: 1063 - protein, 122 aa, Artificial Sequence
  Description of Artificial Sequence: Synthetic heavy chain variable region amino acid sequence
QVQLVESGGDLVKPGGSLRLSCAASGFTLSGHYMSWIRQPPGKGLEWVSSISGGSTYTNYADSVKGRFTISRDNAENSLYLQMNSLRAEDTAVYYCARLAYSDYGPFYFDLWGRGTLVTVSS

SEQ ID NO: 1064 - protein, 112 aa, Artificial Sequence
  Description of Artificial Sequence: Synthetic light chain variable region amino acid sequence
QSVLTQPPSVSGAPGQRVTISCTGSSSNIGAGYDVHWYQQLTGTAPKLLIFDNNNRPSGVPDRFSGSKSGTSASLAITGLQAEDEADYYCQSYDSRLSAPYVFGTGTKLTVL

SEQ ID NO: 1065 - protein, 115 aa, Artificial Sequence
  Description of Artificial Sequence: Synthetic heavy chain variable region amino acid sequence
QVQLQESGAGLLKPSETLSLTCAVSGASFSGYSWSWIRQPPGKGLEWIGDIDHSGSTNYNSSLNSRVTISVDTSKNQFSLNLTSVTAADTAIYYCARVGGRSAYWGQGTLVTVSS

SEQ ID NO: 1066 - protein, 111 aa, Artificial Sequence
  Description of Artificial Sequence: Synthetic light chain variable region amino acid sequence
DIVMTQSPLSLPVTPGEPASISCRSSQSLLHSNGFNYLDWYLQKPGQSPQLLIYLGSNRASGVPDRFSGSGSGTDFTLKISRVEAEDVGVYYCMQALQTLTFGGGTKVEIK

SEQ ID NO: 1067 - protein, 122 aa, Artificial Sequence
  Description of Artificial Sequence: Synthetic heavy chain variable region amino acid sequence
QVQLVQSGAEVKKPGASVKVSCKASGYTFNNYGISWVRQAPGQGLEWMGWISAYNGDIKYAQKFQGRVTVTTDTSTSTAYMELRSLRSDDTAVYYCARDTPVGGGTQTFDYWGQGTLVTVSS

SEQ ID NO: 1068 - protein, 112 aa, Artificial Sequence
  Description of Artificial Sequence: Synthetic light chain variable region amino acid sequence
ETTLTQSPLSLPVTLGQPASISCRSSQSLVHSNGNTYLNWFQQRPGQSPRRLIYTVSNRDSGVPDRFSGSGSGTDFTLKISRVEAEDVGVYYCMQATHRPGTFGQGTKVEIK

SEQ ID NO: 1069 - protein, 118 aa, Artificial Sequence
  Description of Artificial Sequence: Synthetic heavy chain variable region amino acid sequence
EVQLLESGAEVKKPGASVKVSCKASGYTFTDYYIHWVRQAPGQGLEWMGRINPKNGDAIYAQNFQGRVTMTRDTSISTAYMEVSRLTSDDTAVYYCARDQMWLVLDYWGQGTLVTVSS

SEQ ID NO: 1070 - protein, 110 aa, Artificial Sequence
  Description of Artificial Sequence: Synthetic light chain variable region amino acid sequence
QSALTQPASVSGSPGQSITISCTGTSSDVGGYDYVSWYQQHPGKAPKLMIHDVTNRPSGISHRFSGSKSGNTASLTISGLQAGDEADYYCSSYTRSNTKVFGTGTKVTVL

SEQ ID NO: 1071 - protein, 121 aa, Artificial Sequence
  Description of Artificial Sequence: Synthetic heavy chain variable region amino acid sequence
EVQLVESGGGLIQPGGSLRLSCAASGFTVSSNYMSWVRQAAGKGLEWVSLIYSGDSTYYADSVKGRFTISRDNSQNTLYLQMNSLRAEDTAVYYCARDASPNVGYYGMDVWGQGTTVTVSS

SEQ ID NO: 1072 - protein, 108 aa, Artificial Sequence
  Description of Artificial Sequence: Synthetic light chain variable region amino acid sequence
DIVLTQPPSVSVSPGQTASITCSGGKLGDTYACWYQQKPGQSPVLVIYQDSKRPSGIPERFSGSNSGNTATLTISGTQAMDEADYYCQAWDSSTARYVFGTGTKVTVL

SEQ ID NO: 1073 - protein, 132 aa, Artificial Sequence
  Description of Artificial Sequence: Synthetic heavy chain variable region amino acid sequence
EVQLVESGGGLVQPGGSLRLSCAASGFTFSSYWMSWVRQAPGKGLEWVATIKQDGSEKYSVDSVKGRFTISRDNPKKSLYLQMNSLRAEDTAVYYCARDYRVEYYHSSDKLKRYYYYGMDVWGQGTTVTVSS

SEQ ID NO: 1074 - protein, 107 aa, Artificial Sequence
  Description of Artificial Sequence: Synthetic light chain variable region amino acid sequence
DIRVTQSPSSLSASVGDRVTITCRASQSISTYLNWYQQKPGKAPKFLIYAASSLESGVPSRFSGSGSGTDFSLTISSLQPEDFATYYCQQSYSIPITFGQGTRLEIK

SEQ ID NO: 1075 - protein, 123 aa, Artificial Sequence
  Description of Artificial Sequence: Synthetic heavy chain variable region amino acid sequence
QVQLVESGGGVVRPGGSLRLSCAASGFTFDDYGMSWVRQAPGKGLEWVSGINWSGGSTDYADSVKGRFTISRDNAKNSLYLQMNSLRAEDTALYYCAKEGQEWELLPWYFDLWGRGTLVTVSS

SEQ ID NO: 1076 - protein, 110 aa, Artificial Sequence
  Description of Artificial Sequence: Synthetic light chain variable region amino acid sequence
QPVLTQPASVSGSPGQSITIPCTGTSSDVGIYNLVSWYQQHPGKAPKLMIYDVSKRPSGVSNRFSGSKSGNTASLTISGLQAEDEADYYCCSYAGGSTYVFGTGTKLTVL

SEQ ID NO: 1077 - protein, 119 aa, Artificial Sequence
  Description of Artificial Sequence: Synthetic heavy chain variable region amino acid sequence
EVQLVESGGGLVKPGESLRLSCAASGFRFSDHYMSWIRQAPGKGLEWISYISSSSSYIHYADSVTGRFTISRDNAKNSMYLQMNSLRAEDTAVYYCAREIGRSYYMDVWGKGTTVTVSS

SEQ ID NO: 1078 - protein, 112 aa, Artificial Sequence
  Description of Artificial Sequence: Synthetic light chain variable region amino acid sequence
QSALIQPPSVSGAPGQRVTISCTGSSSNIGAGYDVHWYQQLPGTAPKLLIYGNNNRPSGVPDRFSASKSGISASLAITGVQTEDEADYYCQSYDRSLSEFYVFGSGTKVTVL

SEQ ID NO: 1079 - protein, 126 aa, Artificial Sequence
  Description of Artificial Sequence: Synthetic heavy chain variable region amino acid sequence
EVQLVQSGGGLVKPGGSLRLSCVASGFTFSSYSMNWVRQAPGKGLEWVSSISASSSYIDYADSVKGRFTISRDNDKKSLYLQMSSLRAEDTAVYYCAREDYDSLTGYYSPKRFDPWGQGTLVTVSS

SEQ ID NO: 1080 - protein, 110 aa, Artificial Sequence
  Description of Artificial Sequence: Synthetic light chain variable region amino acid sequence
QSVLTQPPSLSGAPGQRVTISCTGSSSNIGAGYDVHWYQQLPGTAPKLLIYGNNNRPSGVPDRFSGSKSGTSASLAITGLQAEDEADYYCQSYDRSLSVVFGGGTKVTVL

SEQ ID NO: 1081 - protein, 119 aa, Artificial Sequence
  Description of Artificial Sequence: Synthetic heavy chain variable region amino acid sequence
QVQLVQSGAEVKKPGASVKVSCKASGYTFISDGISWVRQAPGQGLEWMGWINPHNENTNYAQKFQGRVTMTTDTSTSTAYLELRGLRSDDTAVYYCARDPYHWSYLDYWGQGTLVTVSS

SEQ ID NO: 1082 - protein, 112 aa, Artificial Sequence
  Description of Artificial Sequence: Synthetic light chain variable region amino acid sequence
QSVVTQPPSVSGAPGQRVTITCTGSSSNIGANSDVHWYQQIPGTAPKLLIFGNSNRPSGVPDRFSGSKSGTSASLAITGLQAEDEADYYCQSYDRSLSGSRVFGGGTRLTVL

SEQ ID NO: 1083 - protein, 122 aa, Artificial Sequence
  Description of Artificial Sequence: Synthetic heavy chain variable region amino acid sequence
EVQLVESGGGLVQPAGSLRLSCAASGFTFSNYVMNWVRQAPGKGLEWVSYISSSGRTIHYADSVKGRFTISRDNAKNSLYLEMNSLRAEDTAVYYCARDPNYGGNSNRFDSWGQGTLVTVSS

SEQ ID NO: 1084 - protein, 108 aa, Artificial Sequence
  Description of Artificial Sequence: Synthetic light chain variable region amino acid sequence
DIVMTQTPSSLSASVGDRVTITCRASQTISNYLNWYQQKPGKAPKLLIFAASSLQSGVPSRFSGSGSGTDFTLTISSLQPEDFATYYCQQSYSAPRVTFGPGTKVDIK

SEQ ID NO: 1085 - protein, 126 aa, Artificial Sequence
  Description of Artificial Sequence: Synthetic heavy chain variable region amino acid sequence
EVQLLESGGGLVKPGGSLRLSCAASGFTFSDYTMNWVRQAPGKGLEWVSSISITSSHIYYADSVKGRFTISRDNAKNSLYLQINSLRAEDTAAYYCARELGFASSSYSYYYGMDVWGQGTTVTVSS

SEQ ID NO: 1086 - protein, 108 aa, Artificial Sequence
  Description of Artificial Sequence: Synthetic light chain variable region amino acid sequence
QSALTQPRSVSGSPGQSVTISCTGTSSDVGDYNSVSWYQQHPGTAPKLIIFDVTQRPSGVPDRFSGSKSANTASLTISGLQPEDEADYYCCSFAGNYVFGTGTKVTVL

SEQ ID NO: 1087 - protein, 120 aa, Artificial Sequence
  Description of Artificial Sequence: Synthetic heavy chain variable region amino acid sequence
QVTLKESGGGVVQPGRSQRLSCTASGFNFHNYAMHWVRQAPGKGLEWVAVISYDGSNKNFADSVKGRFTISRDNSKNTLNLQMNNLRAEDTAVYYCVRDIVRGSPLFDYWGQGTLVTVSS

SEQ ID NO: 1088 - protein, 108 aa, Artificial Sequence
  Description of Artificial Sequence: Synthetic light chain variable region amino acid sequence
QPVLTQPPSLSVAPGQTAWITCGGNNIGSKIVHWYQQKPGQAPVVVVYDDDDRPSGIPERFSGSNSGNTATLTIRRVEVGDEADYYCQVWDRSSDNYVFGTGTKVSVL

SEQ ID NO: 1089 - protein, 124 aa, Artificial Sequence
  Description of Artificial Sequence: Synthetic heavy chain variable region amino acid sequence
QVQLVESGGGVVQPGRSLRISCAASGFTFSNYGMHWVRQAPGKGLEWVAVLSYDGSNEYYADSVKGRFTISRDNSKNTLYLQMNSLRAEDTAVYYCAKNLNDYNISWYKCFDLWGRGTLVTVSS

SEQ ID NO: 1090 - protein, 111 aa, Artificial Sequence
  Description of Artificial Sequence: Synthetic light chain variable region amino acid sequence
QPVLTQPASVSGSPGQSITISCTGTSSDVGGYNYVSWYQHHPGKAPKLIIYDVNNRPSGVSNRFSGSKSGNTASLTISGLQAEDEADYICSSYTTITTFVVFGGGTKLTVL

SEQ ID NO: 1091 - protein, 118 aa, Artificial Sequence
  Description of Artificial Sequence: Synthetic heavy chain variable region amino acid sequence
EVQLVETGGGLVQPGRSLRLSCTASGFTFGDYAMNWVRQAPGKGLEWIGIIRTKTYGGTTEYAASVKGRFTISRDDSKGIAYLQMNSLKTEDTGVYYCTMPVLNMDVWGQGTTVTVSS

SEQ ID NO: 1092 - protein, 111 aa, Artificial Sequence
  Description of Artificial Sequence: Synthetic light chain variable region amino acid sequence
QPVLTQPHSVSESPGKTVTISCTRNIGNIASNYVQWYQQRPGSSPTTVIYEDNQRPSGVPDRFSGSIDISSNSASLTISGLKTEDEADYYCQSYDSNNPWVFGGGTQLTVL

SEQ ID NO: 1093 - protein, 122 aa, Artificial Sequence
  Description of Artificial Sequence: Synthetic heavy chain variable region amino acid sequence
EVQLVESGGGLVKPGGSLRLSCAASGFSLSDYYMTWLRQAPGKGLEWVSSIGTTSTYTNYAESVKDRFTISRDNAKNSLYLQMNSLRAEDTAVYYCARDWGFGVERGYFDLWGRGTLVTVSS

SEQ ID NO: 1094 - protein, 107 aa, Artificial Sequence
  Description of Artificial Sequence: Synthetic light chain variable region amino acid sequence
DIVLTQTPSTLSASVGDRVTITCRASQSISFWLAWYQQKPGKAPKLLIYKASTLESGVPSRFSGRGSGTDFTLTISSLQPDDFATYYCQQYNTYTWTFGQGTKVEIK

SEQ ID NO: 1095 - protein, 121 aa, Artificial Sequence
  Description of Artificial Sequence: Synthetic heavy chain variable region amino acid sequence
EVQLVESGGGLVKPGGSLRLSCAASRFTFAGYYMSWIRQAPGKGLEWVSDISPSSTYTNYADSVKGRFTISRDNAGTSVSLQMDSLRADDTAVYYCARITPYGGSHYFDSWGQGTLVTVSS

SEQ ID NO: 1096 - protein, 112 aa, Artificial Sequence
  Description of Artificial Sequence: Synthetic light chain variable region amino acid sequence
QPVLTQPPSVSGAPGQRVTISCTGSSSNIGAGYDLHWYQQLPGTAPKLLIYGNSNRPSGVPDRFSGSKSGTSASLAITGLQAEDEADYYCQSYDNSLSGFYVFGTGTKVTVL

SEQ ID NO: 1097 - protein, 130 aa, Artificial Sequence
  Description of Artificial Sequence: Synthetic heavy chain variable region amino acid sequence
RSSWCSVGAEVKKRGSSVKVSCKASGGTFGGYAVSWVRQAPGQGLEWMGGIIPMFYTTKYAQKLQGRVTITADESTNTAYMDLSSLTSDDTAIYFCAREWHLGRTAVTGTGAFLDAFDIWGQGTMVTVSS

SEQ ID NO: 1098 - protein, 110 aa, Artificial Sequence
  Description of Artificial Sequence: Synthetic light chain variable region amino acid sequence
SYELTQPPSVSEAPRQRVTISCSGSSSNIGNNAVNWYQQLPGKAPKLLIYYDDLLPSGVSDRFSGSKSGTSASLAISGLQSEDEADYYCSAWDDSLNGWVFGGGTKLTVL

SEQ ID NO: 1099 - protein, 119 aa, Artificial Sequence
  Description of Artificial Sequence: Synthetic heavy chain variable region amino acid sequence
EVQLLESGPGLVKPSETLSLTCTVSGGSISSYQWNWIRQPPGKGLEWLGYVYYSGSTNYNPSLKSRVTLSVDTSKNQFSLKLSSVTAADTAVYYCARDRRDGSFVFDYWGQGTLVTVSS

SEQ ID NO: 1100 - protein, 110 aa, Artificial Sequence
  Description of Artificial Sequence: Synthetic light chain variable region amino acid sequence
QSVLIQPASVSGSPGQSITISCTGTSSDVGGYNYVSWYQQHPGKAPKLMIYDVSNRPSGISNRFSGSKSGNTASLTISGLQAEDEADYYCSSYTSSTTLVFGTGTKVTVL

SEQ ID NO: 1101 - protein, 123 aa, Artificial Sequence
  Description of Artificial Sequence: Synthetic heavy chain variable region amino acid sequence
QVQLVQSGGGVVQPGRSLKLSCAASGFTFKSYGMHWVRQAPGKGLEWVAVISYDEINKYYADSVKGRFTISRDYSKNTLSLQMNSLTTEDTAMYYCAKPKTTGYYYLDAFDFWGQGTMVTVSS

SEQ ID NO: 1102 - protein, 107 aa, Artificial Sequence
  Description of Artificial Sequence: Synthetic light chain variable region amino acid sequence
ETTLTQSPSSLSASVGDRVTITCQASQDISNYLNWYQQKPGKAPKLLIYDASNLETGVPSRFSGSGSGTDFTFTISSLQSEDIATYYCQQHDNVPPTFGQGTKVDIK

SEQ ID NO: 1103 - protein, 120 aa, Artificial Sequence
  Description of Artificial Sequence: Synthetic heavy chain variable region amino acid sequence
QVQLVQSGAEVKKPGESLKISCKASGYSFTSHYWIGWVRQMPGKGLEWMGFIFPGDSDTRYSPSLQGQVTISADKSTNTAYLQWNSLKASDTAMYYCARLEYLVSGFEYWGQGTLVTVSS

SEQ ID NO: 1104 - protein, 111 aa, Artificial Sequence
  Description of Artificial Sequence: Synthetic light chain variable region amino acid sequence
QPGLTQPHSVSESPGKTVTISCTRSSGSIASNYVHWYQQRPGSFPTTVIYEDNQRPSGVPDRFSGSIDSSSNSASLTISGLRTEDEADYYCQSYDSSNPVVFGGGTKVTVL

SEQ ID NO: 1105 - protein, 118 aa, Artificial Sequence
  Description of Artificial Sequence: Synthetic heavy chain variable region amino acid sequence
QVQLVQSGAEVKKPGESLKISCKGSGYSFTNNWVGWVRQMPGKGLEWMGIIFPGDSDTRYSPSFRGQVTISVDTSINTAFLQWNSLGASDTAMYYCAMTDYNYSFKSWGQGTLVTVSS

SEQ ID NO: 1106 - protein, 111 aa, Artificial Sequence
  Description of Artificial Sequence: Synthetic light chain variable region amino acid sequence
NFMLTQPHSVSESPGKTITISCTRSSGNIGNNYVQWYQQRPGSSFTTVIYEDYQRPSGVPDRFSGSIDSSSNSATLTISGLKTEDEADYYCQSYDSSNPYVFGTGTKVTVL

SEQ ID NO: 1107 - protein, 120 aa, Artificial Sequence
  Description of Artificial Sequence: Synthetic heavy chain variable region amino acid sequence
QVQLVQSGAEVKKPGASVKVSCKASGYTFTHYGISWVRQAPGQGLEWMAWISAYNGNTNYAQKLQDRVTVTTDTSTSTAYMELRSLRSDDTALYYCARDSMGGTTLFDYWGQGTLVTVSS

SEQ ID NO: 1108 - protein, 114 aa, Artificial Sequence
  Description of Artificial Sequence: Synthetic light chain variable region amino acid sequence
DIVLTQTPLSLPVTLGQPASISCRSSQSLVYSDGNTYLNWFQQRPGQSPRRLIYKVSNRDSGVPDRFTGSGSGTDFTLKISRVEAEDVGVYYCMQGTHWPPMYTFGQGTKLEIK

SEQ ID NO: 1109 - protein, 121 aa, Artificial Sequence
  Description of Artificial Sequence: Synthetic heavy chain variable region amino acid sequence
EVQLLESGGGLVKPGGSLRLSCAASGFIFRDYYMIWIRQAPGKGLEWVSYISSSSTYTNNADSVKGRFTISRDNAKNSLYLQMNSLRAEDTAVYYCARLFASRSDGAFDIWGQGTTVTVSS

SEQ ID NO: 1110 - protein, 111 aa, Artificial Sequence
  Description of Artificial Sequence: Synthetic light chain variable region amino acid sequence
QSVLTQPPSVSGAPGQRVTISCTGSSSNIGAGYDVHWYQQLPETAPKLLIYDNNNRPSGVPDRFSGSKSGTSASLAITGLQAEDEADYYCQSYDSSLSGYVFGTGTTVTVL

SEQ ID NO: 1111 - protein, 117 aa, Artificial Sequence
  Description of Artificial Sequence: Synthetic heavy chain variable region amino acid sequence
QVQLVQSGGGVVQPGRSLRLSCAASGFTVSSYAIHWVRQSAGKGLEWVAVEGRFTISRDNSKNTLYLQMNSLRAEDTAVYYCARLSEALVEPAAHTQYKYHYGLDVWGQGTTVTVSS

SEQ ID NO: 1112 - protein, 112 aa, Artificial Sequence
  Description of Artificial Sequence: Synthetic light chain variable region amino acid sequence
EIVLTQSPLSLPVTPGEPASISCKSSQSLLDSNGYNYLDWYLQKPGQSPQLLIYLVSNRASGVPDRFSGSGSGTDFTLKISRVEAEDVGIYYCMQALQTPWTFGQGTKVEIK

SEQ ID NO: 1113 - protein, 129 aa, Artificial Sequence
  Description of Artificial Sequence: Synthetic heavy chain variable region amino acid sequence
QVQLQQWGAGLLKPSETLSLTCGVYGESFSGHYWSWIRQPPGKGLEWMGEIHHSGTTNYNPSLKSRVTISVDTSKNQFSLKLNSVTAADTAVYYCARNPAEDILTGYSPPFHYYYMDVWGKGTTVTVSS

SEQ ID NO: 1114 - protein, 110 aa, Artificial Sequence
  Description of Artificial Sequence: Synthetic light chain variable region amino acid sequence
QSVLTQPPSVSGAPGQRVTISCTGSSSNIGAGYDVHWYQQIPGTAPKLLIHSNNNRPSGVPDRFSGSKSGTSASLAITGLQAEDEADYYCQSYDSSLSVVFGGGTKLTVL

SEQ ID NO: 1115 - protein, 125 aa, Artificial Sequence
  Description of Artificial Sequence: Synthetic heavy chain variable region amino acid sequence
QVQLVQSGGGLVKPGGSLRLSCTASGFTFSDYYMDWIRQAPGKGLEWVSSISSSSTYTKYADSVKGRFTISRDNAKNSLFLQMNSLRAEDTAVYYCVRNLGPYCSSTSCFVFDYWGQGTLVTVSS

SEQ ID NO: 1116 - protein, 111 aa, Artificial Sequence
  Description of Artificial Sequence: Synthetic light chain variable region amino acid sequence
QSVLTQPPSVSGAPGQRVSISCTGSSSNIGAGYEVHWYKQVPGTAPRLLMYDNTNRPSGVPDRVSGSKSGTSASLAITGLQAEDEADYYCQSYDNSLNKSVFGGGTKVTVL

SEQ ID NO: 1117 - protein, 122 aa, Artificial Sequence
  Description of Artificial Sequence: Synthetic heavy chain variable region amino acid sequence
EVQLVESGGGLVKPGGSLRLSCAASGFTFSDYYMNWIRQAPGKGLEWVSDISPSSSYTNYADSVKGRFTISRDNAKNSLYLQMNSLRAEDTAMYYCARRGSCTGGVCSFDYWGQGTLVTVSS

SEQ ID NO: 1118 - protein, 111 aa, Artificial Sequence
  Description of Artificial Sequence: Synthetic light chain variable region amino acid sequence
QPGLTQPPSVSGAPGQRVTISCTGSSSNIGAGYDVNWYQQLPGTAPKLLIYDNSNRPSGVPDRFSGSKSGTSASLAITGLQAEDEADFYCQSYDSSLSGFVFGTGTKVTVL

SEQ ID NO: 1119 - protein, 124 aa, Artificial Sequence
  Description of Artificial Sequence: Synthetic heavy chain variable region amino acid sequence
EVQLLESGGGLVKPGGSLRLSCAASGFTFRDYYMSWIRQAPGKGLEWVSYISSSSSYTEYADSVKGRFTISRDNAKKSLYLQMNSLRTEDTAVYYCARVITQAGTGTTYYMDVWGKGTTVTVSS

SEQ ID NO: 1120 - protein, 110 aa, Artificial Sequence
  Description of Artificial Sequence: Synthetic light chain variable region amino acid sequence
QSVLTQPPSVSGAPGQRVTISCTGSSSNIGTGYDVHWYQQLPGTAPKLLIYANNNRPSGVPDRFSGSKSGTSASLAITGLQAEDEADYYCQSYDSSLSLVFGGGTKLTVL

SEQ ID NO: 1121 - protein, 132 aa, Artificial Sequence
  Description of Artificial Sequence: Synthetic heavy chain variable region amino acid sequence
QITLKESGPTLVKPTQTLTLTCTFSGFSLTTTGVGVGWIRQPPGKALEWLALIYWDDDKRYSPSLKNRITITKDTSKKQVVLTMTNMDPADTATYYCAHISTVVTYDSSGSYYVLINWFDPWGQGTLVTVSS

SEQ ID NO: 1122 - protein, 112 aa, Artificial Sequence
  Description of Artificial Sequence: Synthetic light chain variable region amino acid sequence
EIVMTQSPLSLPVTPGEPASISCRSSHSLLHSNGYNYLDWYLQKPGQSPQLLIYLGSNRASGVPDRFSGSGSGTDFTLKISRVEAEDVGVYYCMQALQTPLTFGQGTKVDIK

SEQ ID NO: 1123 - protein, 117 aa, Artificial Sequence
  Description of Artificial Sequence: Synthetic heavy chain variable region amino acid sequence
QVQLQQWGAGLLKPSETLSLICDVYGGSFSDYYWSWIRQSPGKGLEWIGEINHSGSTSFHPSLKSRISISIDTSNNQFSLNLSSMTAADTAVYYCARGTLRGYFDYWGQGTLVTVSS

SEQ ID NO: 1124 - protein, 107 aa, Artificial Sequence
  Description of Artificial Sequence: Synthetic light chain variable region amino acid sequence
EIVLTQSPSTLSAFVGDRVTITCRASQSISRWLAWYQQKPGKAPNLLISEASSLESGVPSRFSGSGSGTEFTLTISSLQPDDLGTYYCQQYNGYLWTFGQGTKVEIK

SEQ ID NO: 1125 - protein, 127 aa, Artificial Sequence
  Description of Artificial Sequence: Synthetic heavy chain variable region amino acid sequence
QVQLVQSGAEVKKPGASVQVSCKASGYTFTGDYMHWVRQAPGQGLEWMGRINPNSGGTNYAQKFQGRVTMTRDTSISTAYMELSRLRSDDTAVYYCARAAAEYSSSSPTSYYYMDVWGKGTTVTVSS

SEQ ID NO: 1126 - protein, 108 aa, Artificial Sequence
  Description of Artificial Sequence: Synthetic light chain variable region amino acid sequence
EIQMTQSPSSLSASVGDRVTITCRASQNIYSFLNWYQQKPGKAPKLLIYAASSLQSGVPSRFSGSGSATDFTLTISSLQPEDFATYYCQQSYSPPQITFGQGTKVDIK

SEQ ID NO: 1127 - protein, 117 aa, Artificial Sequence
  Description of Artificial Sequence: Synthetic heavy chain variable region amino acid sequence
EVQLVESGGGVVQPGRSLRLSCAASGFPFSSYAMHWVRQAPGKGLEWVAVIWFEGNEKYFADSVEGRFTISRDNSKNTLYLQMNSLRAEDTARYYCARFYFGAFDIWGQGTLVTVSS

SEQ ID NO: 1128 - protein, 112 aa, Artificial Sequence
  Description of Artificial Sequence: Synthetic light chain variable region amino acid sequence
DIVMTQSPLSLPVTPGEPASISCRSSQSLLHSNGYNSLDWYLQKPGQSPQLLIYLASNRASGVPDRFSGSGSGTDFTLKISRVEAEDVGVYYCMQALQTPYTFGQGTKVEIK

SEQ ID NO: 1129 - protein, 119 aa, Artificial Sequence
  Description of Artificial Sequence: Synthetic heavy chain variable region amino acid sequence
QVQLVQSRAEVKKPGESLKISCKGSLHSFSNNWIGWVRQMPGKGLEWMGIIFPDDSDTRYSPSFQGQVTISADKSISTAYLQWSSLKASDTAIYYCGTVVTLIQGVADWGQGTLVTVSS

SEQ ID NO: 1130 - protein, 111 aa, Artificial Sequence
  Description of Artificial Sequence: Synthetic light chain variable region amino acid sequence
QPVLTQPHSVSESPGKTVTISCTRSSGSIDSSYVQWYQQRPGSSPTTVIYEDNLRPSGVPDRFSGSIDSSSNSASLTISGLKTEDEAEYYCQSYDSSNPVVFGGGTKLTVL

SEQ ID NO: 1131 - protein, 125 aa, Artificial Sequence
  Description of Artificial Sequence: Synthetic heavy chain variable region amino acid sequence
QVTLKESGGGLIQPGGSLRLSCAVSGFTVSSKYMSWVRQAPGKGLEWVSVIYGGGSTYYTDSVKGRFTISRDNSNNTLYLQMNSLRAEDTAIYYCAREARSYNYDYVGNDAFDIWGQGTTVTVSS

SEQ ID NO: 1132 - protein, 114 aa, Artificial Sequence
  Description of Artificial Sequence: Synthetic light chain variable region amino acid sequence
DIVLTQTPDSLAVSLGERATINCKSSQSVLNNFNNKNYLAWYQQKPGQPPKLLIYWASTRESGVPDRFSGSGSGTDFTLTITSLQAEDVAIYYCQQYYRTPPYTFGQGTKVDIK

SEQ ID NO: 1133 - protein, 119 aa, Artificial Sequence
  Description of Artificial Sequence: Synthetic heavy chain variable region amino acid sequence
QVQLVESGGGLVKPGGSLRLSCAASGFSFSAYYMSWIRQAPGKGLEWISNISGGSSYANYADSVEGRFTISRDNAKNSLYLQMNSLRAEDTAVYYCAREFQTYYYMDVWGKGTTVTVSS

SEQ ID NO: 1134 - protein, 111 aa, Artificial Sequence
  Description of Artificial Sequence: Synthetic light chain variable region amino acid sequence
QPVLTQPPSVSGAPGQRVTISCTGSSSNIGAGYEVHWYQQLPGTAPKLLIYGNNNRPSGVPDRFSGSKSGTSASLAITGLQAEDEADYYCQSYDSSLSGSVFGGGTKLTVL

SEQ ID NO: 1135 - protein, 119 aa, Artificial Sequence
  Description of Artificial Sequence: Synthetic heavy chain variable region amino acid sequence
EVQLLESGPGLVKPSETLSLTCIVSGGSISSYNWNWIRQPPGKGLEWIGYIYNSGSTNYNPSLKSRVTISVDTSKNQFSLKLSSVTAADTAVYYCARYFDYGSGGFDYWGQGTLVTVSS

SEQ ID NO: 1136 - protein, 107 aa, Artificial Sequence
  Description of Artificial Sequence: Synthetic light chain variable region amino acid sequence
ETTLTQSPGTLSLSPGERATLSCRASQSVTSTYLAWYQQKPGQAPRLLIYGASSRATGIPDRFSGSGSGTDFTLTISRLEPEDFAVYYCQQFDSSLTFGGGTKVEIK

SEQ ID NO: 1137 - protein, 120 aa, Artificial Sequence
  Description of Artificial Sequence: Synthetic heavy chain variable region amino acid sequence
QVQLVQSGAEVKKPGASLQVSCKASGYTFTDSYFHWVRQAPGQGLEWMGRISPHSGGTNYAQKFQGRVTMTRDTSISTAYLELSRLRSDDTAVYYCATEGPRGPFRFDPWGQGTLVTVSS

SEQ ID NO: 1138 - protein, 110 aa, Artificial Sequence
  Description of Artificial Sequence: Synthetic light chain variable region amino acid sequence
NFMLTQPHSVSESPGKTVTISCTRSSGSIASNYVQWYQQRPGSSPTTVIYEDNQRPSGVPDRFSGSIDSSSNSASLTISGLMTEDEADYYCQSYDSSNWVFGGGTKLTVL

SEQ ID NO: 1139 - protein, 125 aa, Artificial Sequence
  Description of Artificial Sequence: Synthetic heavy chain variable region amino acid sequence
QVQLVQSGGGVVQPGRSLRLSCAASGFTFSSYSMHWVRQAPGKGLEWMAVCWYDGSNIYYADSVKGRFTISRDNSKNTVYLQMNSLRAEDTAVYYCARDDRYCSGGTCLSAFDIWGQGTMVTVSS

SEQ ID NO: 1140 - protein, 107 aa, Artificial Sequence
  Description of Artificial Sequence: Synthetic light chain variable region amino acid sequence
ETTLTQSPSSLSASVGDRVTITCRASQSISSYLNWYQQKPGRAPKLLIYTTSSLQSGVSSRFSGSGSGTDFTLTINSLQPEDFATYYCQQSYSTPNTFGQGTKVEIK

SEQ ID NO: 1141 - protein, 118 aa, Artificial Sequence
  Description of Artificial Sequence: Synthetic heavy chain variable region amino acid sequence
QVQLVQSGAEVKKPGESLKISCQVSRDTSTTYWIGWVRQMPGKGLEWMGIIFPGDSDTRYSPSFQGQVTISADKSIMTAYLQLTSLKASDTAMYYCATQALRGAFDIWGQGTMVTVSS

SEQ ID NO: 1142 - protein, 107 aa, Artificial Sequence
  Description of Artificial Sequence: Synthetic light chain variable region amino acid sequence
DIRLTQSPSSLSASVGDRVTITCQASQDISNYLNWYQQKPGKAPKLLIYDASYLETGVPSRFSGSGSGTDFTFTISSLQPEDFATYYCQQYDDLLFTFGPGTKLEIK

SEQ ID NO: 1143 - protein, 122 aa, Artificial Sequence
  Description of Artificial Sequence: Synthetic heavy chain variable region amino acid sequence
QVQLQQWGAGLLKPSETLSLTCAVSGESLTGYFWSWIRQPPGKGLEWIGEVSHSGSTNYNPSLKSRVTMSVDTSKTQFSLKLNSVTAADTAVYYCARGYDYWSGTARYFDYWGQGILVTVSS

SEQ ID NO: 1144 - protein, 111 aa, Artificial Sequence
  Description of Artificial Sequence: Synthetic light chain variable region amino acid sequence
QPVLTQPASVSGSPGQSITISCTGTSSDVGGYNYVSWYQQHPGKAPKLMIYDVSNRPSGVSSRFSGSKSGNTASLTISGLQAEDEGDYYCSSYRSSTTSRVFGGGTKVTVL

SEQ ID NO: 1145 - protein, 123 aa, Artificial Sequence
  Description of Artificial Sequence: Synthetic heavy chain variable region amino acid sequence
EVQLVESGGGLVKPGGSLRLSCAASGFTFSDYYMTWIRQAPGKGLEWVSNISGGSSYTNYADSVKGRFTISRDNAKNSVYLQMNSLRAEDTAVYYCARVGCSGGVCNFFLDYWGQGTLVTVSS

SEQ ID NO: 1146 - protein, 111 aa, Artificial Sequence
  Description of Artificial Sequence: Synthetic light chain variable region amino acid sequence
QSVLTQPPSVSGAPGQRVTISCTGSSSNIGAGYDVHWYQQLPGTAPKLLIYDNTNRPSGVPDRFSGSKSGTSASLAITGLQAEDEADYYCQSYDSSLSGYVFGTGTKVTVL

SEQ ID NO: 1147 - protein, 118 aa, Artificial Sequence
  Description of Artificial Sequence: Synthetic heavy chain variable region amino acid sequence
EVQLVQSGAEVKKPGESLKISCMGSGYNFPNYWIGWVRQMSGKGLEWMGIIYPDDSDTTYSPSFQGQVIFSADKSISTAYLQWSSLKASDTAMYFCVRLDKTTQIDFWGQGTLVTVSS

SEQ ID NO: 1148 - protein, 107 aa, Artificial Sequence
  Description of Artificial Sequence: Synthetic light chain variable region amino acid sequence
EIVLTQSPSSLSASVGDRVTITCQASQDISNYLNWYQQKPGKAPKLLIYDVSNLETGVPSRFSGSGSGTDFTFTISSLQPEDIATYYCQQHDNLPLTFGQGTRLEIK

SEQ ID NO: 1149 - protein, 127 aa, Artificial Sequence
  Description of Artificial Sequence: Synthetic heavy chain variable region amino acid sequence
EVQLVQSGPGLVKPSETLSLTCTVSGDSISSSDYSYYWGWIRQPPGKGLEWIASLSYSGKTYSQSSLKSRVIISVDTSKKQFSLKLSSVTAADTAVYYCAVTRCYVCTSEGDSFDMWGQGTMVTVSS

SEQ ID NO: 1150 - protein, 108 aa, Artificial Sequence
  Description of Artificial Sequence: Synthetic light chain variable region amino acid sequence
DIVLTQTPGTLSLSPGERATLSCRASQSISGNYLAWYQHKPGQAPRLLIYGASTRATGIPDRFSGSGSGTDFPLTISRLEPEDFAVYYCQQYATSPYTFGQGTKVDIK

SEQ ID NO: 1151 - protein, 122 aa, Artificial Sequence
  Description of Artificial Sequence: Synthetic heavy chain variable region amino acid sequence
EVQLVESGGGLVQSGGSLRLSCAASGFTFSSYEMNWVRQAPGKGLEWVSYTTNNGRTIYYADSVKGRFTISRDNAKNSLFLQMNGLRAEDTAVYYCARGIQFSRVDYAMDVWGQGTTVTVSS

SEQ ID NO: 1152 - protein, 111 aa, Artificial Sequence
  Description of Artificial Sequence: Synthetic light chain variable region amino acid sequence
SYELTQPPSVSGTPGQRITISCSGSSSNIASNTVNWYQHLPGTAPKLLIYSDNQRPSGVPDRFSGSKSGTSASLAISGLQSEDEADYYCAIWDDSLNASYVFGTGTKLTVL

SEQ ID NO: 1153 - protein, 119 aa, Artificial Sequence
  Description of Artificial Sequence: Synthetic heavy chain variable region amino acid sequence
EVQLVESGGGLVQPGGSLRISCAASGLTFSSYAMSWVRQAPGQGLEWVSSVSGSGVSTYYADSVKGRFTISRDNSKNTLYLQMNSLRAEDTAVYYCAKEDYYHFYMDVWGNGTTVTVSS

SEQ ID NO: 1154 - protein, 108 aa, Artificial Sequence
  Description of Artificial Sequence: Synthetic light chain variable region amino acid sequence
ETTLTQSPATLSVSPGERATLSCRASQSVSSNLAWYQQKPGQAPRLLIYGASTRAAGIPARFSGSGSGTEFTLTISSLQSEDFAVYYCQQHDNWPSYTFGQGTKVEIK

SEQ ID NO: 1155 - protein, 131 aa, Artificial Sequence
  Description of Artificial Sequence: Synthetic heavy chain variable region amino acid sequence
QVQLVQSGAEVKSPGSSATVSCKASGGTFGSYGISWVRQAPGQGLEWIGAIMPMFGTTNYAQKFQGRVTMTADESTSTVYMDVSSLRPDDTAVYYCVRDVFYDILTGYYDADYYHHYMDVWGKGTTVTVSS

SEQ ID NO: 1156 - protein, 112 aa, Artificial Sequence
  Description of Artificial Sequence: Synthetic light chain variable region amino acid sequence
DIVMTQSPLSLPVTLGQPASISCRSGQSLVHSDGNTYLNWFQQRPGQSPRRLIYKVSNRGSGVPDRFSGSGSGTDFTLKISRVEAEDVGVYFCMQGTHWPRTFGQGTKVDIK

SEQ ID NO: 1157 - protein, 129 aa, Artificial Sequence
  Description of Artificial Sequence: Synthetic heavy chain variable region amino acid sequence
QVQLVESGAEVKKPGSSVKVSCKASEGTFSSYGISWVRQAPGQGPEWMGEINPMFGTAKYAQKFQGRVTITVDESTSTADMELSSLTSEDTAVYYCAREFLGQCSETNCPTPSRHLDYWGQGTLVTVSS

SEQ ID NO: 1158 - protein, 106 aa, Artificial Sequence
  Description of Artificial Sequence: Synthetic light chain variable region amino acid sequence
EIVMTQSPSSLSASVGDRVTITCRASRTISSYLNWYQQKPGKAPKLLIYATSNLQSGVPSRFSGSGSGADFTLTISSLQPEDFATYYCQQTYSTPGFGPGTKVDIK

SEQ ID NO: 1159 - protein, 123 aa, Artificial Sequence
  Description of Artificial Sequence: Synthetic heavy chain variable region amino acid sequence
QVQLVQSGGGLVQRGGSLRLSCAASGFSFRSYAMSWVRQAPGKGLEWVSSISDSGDNTFYADSVKGRFSISRDNSRDTLYLQMNSLRAEDTAVYYCARGGYCSGGNCFPFDYWGQGTLVTVSS

SEQ ID NO: 1160 - protein, 108 aa, Artificial Sequence
  Description of Artificial Sequence: Synthetic light chain variable region amino acid sequence
SYELMQLPSVSVSPGQTARITCSGDALPKQYGYWYQQKPGQAPVLVIYKDSERPSGIPERFSGSSSGTTVTLTISGVQAEDEADYYCQSADSGGTYVMFGGGTKLTVL

SEQ ID NO: 1161 - protein, 125 aa, Artificial Sequence
  Description of Artificial Sequence: Synthetic heavy chain variable region amino acid sequence
QVQLVESGGRLVKPGGSLRLSCAASGFTFSDFYMSWIRQAPGKGLEWVSYISSSGDDPNYADSVKGRFTISRDNSKNSLYLQMNSLRAEDTAVYYCARDEVGWNNLDYYFGMDVWGQGTTVTVSS

SEQ ID NO: 1162 - protein, 112 aa, Artificial Sequence
  Description of Artificial Sequence: Synthetic light chain variable region amino acid sequence
DIVMTQSPLSLPVTLGQPASISCRSSQSLVHSDGNTYLSWFHQRPGQSPRRLIYKVSNRDSGVPNRFSGGGSGTDFTLKISRVEAEDVGFFYCMQGTHWQKTFGQGTKVEIK

SEQ ID NO: 1163 - protein, 129 aa, Artificial Sequence
  Description of Artificial Sequence: Synthetic heavy chain variable region amino acid sequence
QVQLVQSGAEVKKPGSSVKVSCKASGGTFSSYGISWVRQAPGQGLEWMGGIIPMFGAANYAQKFQGRVTITAETSTSTAFMELSSLRSDDTAVYYCARIRWVPNWGGTATSFYNGMDVWGQGTTVTVSS

SEQ ID NO: 1164 - protein, 108 aa, Artificial Sequence
  Description of Artificial Sequence: Synthetic light chain variable region amino acid sequence
EIVMTQSPGTLSLSPGERATLSCRASQSVSSSYLAWYQQKPGQAPRLLIYGASSRATGIPDRFSGSGSGTDFTLTISRLEPEDFAVYYCQHYGSSLFTFGPGTKVDIK

SEQ ID NO: 1165 - protein, 117 aa, Artificial Sequence
  Description of Artificial Sequence: Synthetic heavy chain variable region amino acid sequence
QVQLVQSGAEVKKPGASVKVYCKASGYTFTSHYIHWVRQAPGQGLEWMGRMNPSGGSPMYAQKFQERVTMTRDTSTSTAYMELRSLRSEDTAVYYCAMAKFYSFDYWGQGTLVTVSS

SEQ ID NO: 1166 - protein, 110 aa, Artificial Sequence
  Description of Artificial Sequence: Synthetic light chain variable region amino acid sequence
QSVLTQPHSVSESPGKTVTISCTRSSGSIASYFVHWYQQRPGSAPTIVIYEDNQRPSGVPDRFSGSIDSSSNSASLTISGLKTEDEADYYCQSYDSSNWVFGGGTKLTVL

SEQ ID NO: 1167 - protein, 124 aa, Artificial Sequence
  Description of Artificial Sequence: Synthetic heavy chain variable region amino acid sequence
EVQLVESGGGLVKPGGSLRLSCAASGFTFSNTWMSWVRQAPGKGLEWVGHIKSKTDGGTTDYAAPVKGRFTISRDDSKSILNLHLNSLKTEDSAVYYCAALPPISGWYYTPGFWGQGTLVTVSS

SEQ ID NO: 1168 - protein, 107 aa, Artificial Sequence
  Description of Artificial Sequence: Synthetic light chain variable region amino acid sequence
SYELTQPPSMSVSPGQTARITCFGDAVPKKYVYWYQQKSGQAPVMVIYDDRRRPSGIPERFSGSSSGARATLTISGAQVEDEADYYCYSTDGSGNPSFGGGTKLTVL

SEQ ID NO: 1169 - protein, 120 aa, Artificial Sequence
  Description of Artificial Sequence: Synthetic heavy chain variable region amino acid sequence
EVQLVQSGAEVKKPGESLTISCKDSGYSFTSYWIGWVRQVPGKGLEWMGIVYPGDSRYSPSFQGHVTMSADKSINTAYLQWSTLKASDTAMYYCAKVVTYGSAIRWFESWGQGTLVTVSS

SEQ ID NO: 1170 - protein, 110 aa, Artificial Sequence
  Description of Artificial Sequence: Synthetic light chain variable region amino acid sequence
QSVLTQPPSVSAAPGQKVSISCSGSSSNIGNNFVSWYQQVPGTAPKLLIIDNNKRPSGIPDRFSGSKSGTSATLGITGLQTGDEADYYCGTWDSRLSAEVFGGGTKLTVL

SEQ ID NO: 1171 - protein, 130 aa, Artificial Sequence
  Description of Artificial Sequence: Synthetic heavy chain variable region amino acid sequence
QVQLQQSGPGLVKPSQTLSLTCAISGDSVSSNSAAWNWIRQSPSRGLEWLGRTYYRSKWYNDYAVSVKSRITINPDTSKNQFSLQLNSVTPEDTAVYYCARDLPQVDYFDGASFYFFDFWGQGTLVTVSS

SEQ ID NO: 1172 - protein, 108 aa, Artificial Sequence
  Description of Artificial Sequence: Synthetic light chain variable region amino acid sequence
QPVLTQPPSVSVAPGQTASITCGGNIIGNKGVHWYQQKPGRAPVLVVYDDSDRPSGIPERFSGSNSGNTATLTISRVEAADEADYYCQVWDTGSHPVVFGGGTKVTVL

SEQ ID NO: 1173 - protein, 126 aa, Artificial Sequence
  Description of Artificial Sequence: Synthetic heavy chain variable region amino acid sequence
QVQLVQSGPGLVKPSGTLSLTCAVSGGSISTTHWWSWVRQPPGKGLEWIGEIYHSGSTNYNPSLKSRVTISVDKSRSQFSLKLTSVTAADTAVYYCARGDPLCSGGICYSGYFDYWGQGTLVTVSS

SEQ ID NO: 1174 - protein, 106 aa, Artificial Sequence
  Description of Artificial Sequence: Synthetic light chain variable region amino acid sequence
SYVLTQPPSVSVSPGQTATITCSGDKLGDQYACWYQQKSGQSPVLVIYRDNKRPSGIPERFSGSNSGNTATLTISETQAMDEADYYCQAWGSSSVVFGGGTKVTVL

SEQ ID NO: 1175 - protein, 120 aa, Artificial Sequence
  Description of Artificial Sequence: Synthetic heavy chain variable region amino acid sequence
EVQLVESGGGLVKPGGSLRLSCVASGFGFTSYSMNWVRQAPGKGLEWVSSISASSTYIHYADSVKGRFTISRDNARNSLYLQMISLRADDTAVYYCSRDGPTYGSGVHVWGQGTMVTVSS

SEQ ID NO: 1176 - protein, 112 aa, Artificial Sequence
  Description of Artificial Sequence: Synthetic light chain variable region amino acid sequence
QSALIQPVSVSGSPGQSITISCTGTRSDVGGYNYVSWYQQHPGKAPKLMIYEVRNRPSGVSDRFSGSKSGNTASLTISGLQAEDEGDYYCSSYTSSDTLFYVFGSGTKLTVL

SEQ ID NO: 1177 - protein, 124 aa, Artificial Sequence
  Description of Artificial Sequence: Synthetic heavy chain variable region amino acid sequence
EVQLVESGGGVVQPGQSLRLSCAASGFTFSSFAMHWVRQAPGKGLEWVAVISYDGSNKYYADSVKGRFTISRDNSKNTLSLQVNSLRAEDTAVYYCARVSAEGSMGRFSDFNYWGLGTLVTVSS

SEQ ID NO: 1178 - protein, 110 aa, Artificial Sequence
  Description of Artificial Sequence: Synthetic light chain variable region amino acid sequence
QSALTQPASVSGSPGQSITISCTGTSSDVGSYNLVSWYQQHPGKAPKLMIYEVRKRPSGVSNRFSGSKSGNTASLTISGLQAEDEADYYCCSYAGSDTYVFGTGTKLTVL

SEQ ID NO: 1179 - protein, 128 aa, Artificial Sequence
  Description of Artificial Sequence: Synthetic heavy chain variable region amino acid sequence
QVQLQESGPGLVKPSQTLSLTCAISGDSVSSNNAAWNWIRQSPSRGLEWLGRTYYRSKWYNDYAVSVKSRITINPDTSKNQLSLQLNSVTPEDTAVYYCARAGVRQWLVRGMDAFDIWGQGTMVTVSS

SEQ ID NO: 1180 - protein, 113 aa, Artificial Sequence
  Description of Artificial Sequence: Synthetic light chain variable region amino acid sequence
DIRLTQSPDSLAVSLGERATVNCKSSQSVLYSSNNKNYLAWYQQKPGQPPKLLIYWASTRESGVPDRFSGSGSGTDFTLTISSLQAEDVAVYYCQQYYNTPHTFGQGTKVEIK

SEQ ID NO: 1181 - protein, 124 aa, Artificial Sequence
  Description of Artificial Sequence: Synthetic heavy chain variable region amino acid sequence
EVQLLESGGDLVRPGGSLRLSCTASGFSFSSSEMNWVRQAPGKGLEWVASINSGGDDIYYADSVKGRFTISRDNAKNSLSLQMDSLRAEDTALYYCARSRSGYSSGWSRFFGNWGQGTLVTVSS

SEQ ID NO: 1182 - protein, 108 aa, Artificial Sequence
  Description of Artificial Sequence: Synthetic light chain variable region amino acid sequence
QSALTQPRSVSGSPGQSVTISCTGTISDIGAYNYVSWYQQHPGKAPKVMIYDVSKRPSGVPDRFSGSKSGFTASLTISGLQAEDEADYYCCSYAGRWVFGGGTKLTVL

SEQ ID NO: 1183 - protein, 121 aa, Artificial Sequence
  Description of Artificial Sequence: Synthetic heavy chain variable region amino acid sequence
EVQLVESGGGLVKPGGSLRLSCAASGFSFSSYAMNWVRQAPGKGLQWVSSISAGSSYIDYADSVKGRFTISRDNAENSLFLQMNSLRVEDTAVYYCARVGSYTHGYEFDYWGQGTLVTVSS

SEQ ID NO: 1184 - protein, 110 aa, Artificial Sequence
  Description of Artificial Sequence: Synthetic light chain variable region amino acid sequence
QPVLTQPPSVSGAPGQRVTISCTGSNSNIGAGYDVHWYQQLPGTAPKLLIYASTIRPSGVPDRFSGSKSGTSASLAITGLQAEDEADYYCQSYDRNLSVVFGGGTKVTVL

SEQ ID NO: 1185 - protein, 134 aa, Artificial Sequence
  Description of Artificial Sequence: Synthetic heavy chain variable region amino acid sequence
EVQLVESGGGLVKPGGSLRLSCAASGFMFSTYSMNWVRQAPGKGLEWVSFITGSSSDKYYAHSVKGRFTISRDNAKRTLYLQLNSLRAEDTAVYYCARFRGLYCDGDCSSRGNTYYNYYGMDVWGQGTTVTVSS

SEQ ID NO: 1186 - protein, 112 aa, Artificial Sequence
  Description of Artificial Sequence: Synthetic light chain variable region amino acid sequence
EIVMTQSPLSLSVIPGEPASISCRSSKSLLHSNGYTYLDWYLQKPGQSPQLLIHLGSNRASGVPDRFSGSGSGTDFTLKISRVEAEDVGVFYCMQALQAPPTFGPGTKVEIK

SEQ ID NO: 1187 - protein, 127 aa, Artificial Sequence
  Description of Artificial Sequence: Synthetic heavy chain variable region amino acid sequence
EVQLVESGGGLVQPGRSLRLSCRASGFTFRNYAMSWVRQAPGKGLEWVGFIRGKGYGGTTEYAASVKGRFTISSDDSRSIAYLQMNSLKTEDTAVYYCTRVREDGVIAVAEYYFDYWGQGTLVTVSS

SEQ ID NO: 1188 - protein, 108 aa, Artificial Sequence
  Description of Artificial Sequence: Synthetic light chain variable region amino acid sequence
GIQMTQSPGTLSLSPGERATLSCRASQSVSSSYLAWYQQKPGQAPRLLIHGASSRATGIPDRFSGSGSGTDFTLTISRLEPEDFAVYHCQQYGSSPWTFGQGTKVEIK

SEQ ID NO: 1189 - protein, 125 aa, Artificial Sequence
  Description of Artificial Sequence: Synthetic heavy chain variable region amino acid sequence
QVQLQESGPGLVKPSGTLSLTCAVSGGSITGRNWWSWVRQPPGKELERIGEIYHGGSTEYNPSLKGRVTISVDKSKNQFSLRLNSVTAADTAVYYCARVAHYDSNGYYIGYFDLWGRGTLVTVSS

SEQ ID NO: 1190 - protein, 107 aa, Artificial Sequence
  Description of Artificial Sequence: Synthetic light chain variable region amino acid sequence
EIVLTQSPPSLSASVGDRVTITCRASQSISIYLNWYQQKPGKAPKLLIFAASSLQSGVPLRFSGSGSGTDFTLTISSLQPEDFATYYCHQSYSAPWTFGQGTKVDIK

SEQ ID NO: 1191 - protein, 126 aa, Artificial Sequence
  Description of Artificial Sequence: Synthetic heavy chain variable region amino acid sequence
EVQLVESGPALVKPTQTLTLTCTFSGFSLSTKRMGVSWIRQPPGKALEWLARIDWDDDKFYSTSLKTRLTISKDTSKNQVVLTLANMDPVDTATYFCARTTVYASGGYYLYYLDYWGQGTLVTVSS

SEQ ID NO: 1192 - protein, 107 aa, Artificial Sequence
  Description of Artificial Sequence: Synthetic light chain variable region amino acid sequence
DIVMTQTPSSLSASVGDRVTLTCRASQRIASYVNWYHQKPGKAPNLLIYAASNLQSGVPSRFSGSGSGTDFTLTISSLQPEDFATYYCQQSYSTPLTFGQGTKLEIK

SEQ ID NO: 1193 - protein, 123 aa, Artificial Sequence
  Description of Artificial Sequence: Synthetic heavy chain variable region amino acid sequence
QVQLVQSGAEVKKAGETLKISCRGPAHTFTSFWIGWVRQTPGKGLEWMGNIYPGDTDTTYSPSFRGQVTISADKSISTAYLQWNSLKASDTAIYYCATRVRHGYSSSGSFESWGQGTMVTVSS

SEQ ID NO: 1194 - protein, 111 aa, Artificial Sequence
  Description of Artificial Sequence: Synthetic light chain variable region amino acid sequence
QSVVTQPPSVSGAPGQRITISCTGSNSNTGAGYDVHWYQQLPGAAPKLLIFANNNRPSGVPDRFSGSKSGTSASLAITGLQAEDEADYYCQSYDNSLSAYVFGTGTKLTVL

SEQ ID NO: 1195 - protein, 124 aa, Artificial Sequence
  Description of Artificial Sequence: Synthetic heavy chain variable region amino acid sequence
QVQLVESGPGLVKPSETLALTCTVSGGSLSTYYWSWIRQPPGKGLEWIGYIYYSGTTYYNPSLKSRVTISEDRSKNQFSLKLTSVTAADTAVYYCARHGPKTEFWSAQYYLELWGRGTLVTVSS

SEQ ID NO: 1196 - protein, 108 aa, Artificial Sequence
  Description of Artificial Sequence: Synthetic light chain variable region amino acid sequence
EIVLTQSPGTLSLSPGERATLSCRASQSVSSDYLAWYQQKPGQAPSLLIYGVSTRATGIPDRISGSGSGTDFTLTISRLEPEDFAVYYCHQYGTSPWTFGQGTKVEIK

SEQ ID NO: 1197 - protein, 125 aa, Artificial Sequence
  Description of Artificial Sequence: Synthetic heavy chain variable region amino acid sequence
QVQLVQSGAEVKKPGASVKVSCKASGYSFTNHGIHWVRQAPGQRLEWMGWINVANGFTAYSQNLQGRVTFTRDTSASTAYLELTSLRSEDTAVYHCARDESYCSAGYCYLYFDYWGQGTTVTVSS

SEQ ID NO: 1198 - protein, 107 aa, Artificial Sequence
  Description of Artificial Sequence: Synthetic light chain variable region amino acid sequence
DIQVTQSPSSLSASVGDRVTITCRASQNIITYVNWYQQKPGKAPELLIFGASSVQSGVPSRFSGSGSGTDFTLTISSLRPDDFATYYCQQSYSNPRTFGGGTKVEIK

SEQ ID NO: 1199 - protein, 120 aa, Artificial Sequence
  Description of Artificial Sequence: Synthetic heavy chain variable region amino acid sequence
QVQLVQSGGGVVQPGRSLRLSCAASGFMFTIYSMHWVRQAPGKGLEWVAVISNDGVNKYYSDSVKGRFTISRDNSKNTLYLQMNNLRAEDTAVYYCASDIVVLVTATDYWGQGTLVTVSS

SEQ ID NO: 1200 - protein, 108 aa, Artificial Sequence
  Description of Artificial Sequence: Synthetic light chain variable region amino acid sequence
ETTLTQSPVTLSLSPGERATLSCRTSQSFSSPLLAWYQQKPGQAPRLLIYGASNRATGIPDRFSGSGSGTDFTLTISRLEPVDFAVYYCQQYGSSPYTFGQGTKLEIK

SEQ ID NO: 1201 - protein, 123 aa, Artificial Sequence
  Description of Artificial Sequence: Synthetic heavy chain variable region amino acid sequence
QVTLKESGPTLVKPTQTLTLTCTFSGFSLSTFGVAVGWIRQPPGKALEWLALIYWDDDKRYSPSLKSRLTITKDISKNQVVLTMTNMDPVDTATYYCAHRLRSLTARGVFDIWGQGTTVTVSS

SEQ ID NO: 1202 - protein, 107 aa, Artificial Sequence
  Description of Artificial Sequence: Synthetic light chain variable region amino acid sequence
DIRLTQSPSSLSASVGDRVTITCRASQSINNFLNWYQQRPGKAPTLLIYSASSLQSGVPSRFSGSGSGTDFTLTISSLQPEDFATYFCQQTDSFPWTFGQGTKVEIK

SEQ ID NO: 1203 - protein, 131 aa, Artificial Sequence
  Description of Artificial Sequence: Synthetic heavy chain variable region amino acid sequence
QVQLVQSGGGLVKPGGSLRLSCAASGFTFSNAWMSWVRQAPGKGLEWVGRIKSEVDGGTADYAANVKGRLTISRDDSKNMMYLQMNSLKTEDTAVYYCTTDPGVGWIFGEVKLFRTDPEYWGQGTLVTVSS

SEQ ID NO: 1204 - protein, 111 aa, Artificial Sequence
  Description of Artificial Sequence: Synthetic light chain variable region amino acid sequence
QSVLTQPPSVSAAPGQKVTISCSGSSSNIGNHYVSWYQQLPGTSPKLLIYDNNKRPSGIPDRFSGSKSGTSATLGITGLQPGDEADYYCGTWDSSLSAVRVFGGGTKVTVL

SEQ ID NO: 1205 - protein, 126 aa, Artificial Sequence
  Description of Artificial Sequence: Synthetic heavy chain variable region amino acid sequence
QVQLVQSGAEVKKPGSSVKVSCKASGGTFSYYAISWVRQAPGQGLEWMGGIIPILGTVKNAQKFQGRVTITADKITSIAYMELSSLRHEDTAVYYCARDYYDSSGYYYNGYGMDVWGQGTTVTVSS

SEQ ID NO: 1206 - protein, 112 aa, Artificial Sequence
  Description of Artificial Sequence: Synthetic light chain variable region amino acid sequence
QSVLIQPPSASGTPGQRVTISCSGSSSNIGSNYVYWYQQLPGTAPKLLIYRNDQRPSGVPDRFSGSKSGTSASLAISGLRSGDEADYYCAAWDDSLGGPIWVFGGGTKLTVL

SEQ ID NO: 1207 - protein, 126 aa, Artificial Sequence
  Description of Artificial Sequence: Synthetic heavy chain variable region amino acid sequence
QVQLVQSGAEVKKPGASVKVSCKASGYTFISYGISWVRQAPGQGPEWMGWISTHNGNTNYAQKLQGRVTMTTDTSTSTAYMELRSLRSDDTAVYYCARDERSIAVEVYLGSTFDIWGQGTMVTVSS

SEQ ID NO: 1208 - protein, 107 aa, Artificial Sequence
  Description of Artificial Sequence: Synthetic light chain variable region amino acid sequence
DIQVTQSPSSVSASVGDRVTITCRASQGISSWLAWYQQKPGKAPKLLIYAASTLQSGVPSRFSGSGSGTDFTLTISRLQPEDFATYYCQQANIFGVTFGPGTKVDIK

SEQ ID NO: 1209 - protein, 123 aa, Artificial Sequence
  Description of Artificial Sequence: Synthetic heavy chain variable region amino acid sequence
EVQLVESGGGLVQPGRSLRLSCAASGFTFDDYAMHWVRQAPGKGLEWVSSISWHSADIGYAASVEGRFTISRDNAKNSLFLQMNSLRPEDTALYYCAKEIVSTSWYSGYFQDWGQGTLVTVSS

SEQ ID NO: 1210 - protein, 110 aa, Artificial Sequence
  Description of Artificial Sequence: Synthetic light chain variable region amino acid sequence
QPVLTQPRSVSGSPGQSVTISCTGTSSDVGDYNYVSWYQQHPGKAPKLMIYDVSKRPSGVPDRFSGSKSGNTASLTISGLQGEDEADYYCCSYAGRHTFVFGTATKVTVL

SEQ ID NO: 1211 - protein, 128 aa, Artificial Sequence
  Description of Artificial Sequence: Synthetic heavy chain variable region amino acid sequence
EVQLVESGGGLVQPGGSLRLSCAASGFTFSSYAMSWVRQAAGKGLEWVSAISGSGDDTFYADSVKDRFIISRDSSKRKVYLQMNSLRVEDTAVYYCAKTDIMVTFGGVVVDAYYFDHWGQGTLVTVSS

SEQ ID NO: 1212 - protein, 109 aa, Artificial Sequence
  Description of Artificial Sequence: Synthetic light chain variable region amino acid sequence
ETTLTQSPGTLSLSPGERATLSCRASQFVFRSYLAWYQQRPGQPPRLLIYGASSRATGIPDRFSGRGSGTEFTLTISRLEPEDFAMYYCQHYDSSPPGTFGGGTKVEIK

SEQ ID NO: 1213 - protein, 122 aa, Artificial Sequence
  Description of Artificial Sequence: Synthetic heavy chain variable region amino acid sequence
EVQLVQSGAEVKKPGESLKISCKGSGYSFSSFWIGWVRQMPGKGLEWMGIIYPGDSDTRYSPSFQGQVTISADQSIRTAYLQWNSLKASDTGLYYCAKGGLGDVEMATIAVWGQGTLVTVSS

SEQ ID NO: 1214 - protein, 112 aa, Artificial Sequence
  Description of Artificial Sequence: Synthetic light chain variable region amino acid sequence
QSVLIQPASVSGSPGQSITIPCTGTSSDVGSYNLVSWYQHHPGKAPKLIISEGSKRPLGVSNRFSGSKSGNTASLTISGLQAEDEADYYCSSYVRSRTFNYVFGTGTKLTVL

SEQ ID NO: 1215 - protein, 126 aa, Artificial Sequence
  Description of Artificial Sequence: Synthetic heavy chain variable region amino acid sequence
QVQLQQWGAGLLKPSETLSLTCVVYGESFSDSGYYWTWIRQPPEKGLEWIGEINHGGSTSYNPSLKSRVTISVDTSENQFSLKVTSVTGADTAVYYCARLRLGCSGGSCYSRFDYWGQGTLVTVSS

SEQ ID NO: 1216 - protein, 107 aa, Artificial Sequence
  Description of Artificial Sequence: Synthetic light chain variable region amino acid sequence
DIQLTQSPSSLSASVGDRVTITCRASQSINSYLNWYQQKPGKAPVLLIHAASSLQGGVPSRFSGSGSGTDFTLTISSLQPEDFATYYCQQSYNTRWTFGHGTKVDIK

SEQ ID NO: 1217 - protein, 124 aa, Artificial Sequence
  Description of Artificial Sequence: Synthetic heavy chain variable region amino acid sequence
EVQLLESGGGVVQPGRSLRLSCAASGFSFSSYGIHWVRQAPGKGLECVALMSYDGSEKYYADSVKGRFTISRDNSKNTLYLHMNSLRREDTAVYYCAKGSHLRWSHLDYYFHLWGRGTLVTVSS

SEQ ID NO: 1218 - protein, 103 aa, Artificial Sequence
  Description of Artificial Sequence: Synthetic light chain variable region amino acid sequence
DIVMTQSPSTLSASVGDRVTITCRASQSLSTWLAWYQQKPGKAPKLLISDASNLESGVPSRFSGRGSGTEFTLTISGLQPDDFATYYCQQERTFGQGTKVDIK

SEQ ID NO: 1219 - protein, 124 aa, Artificial Sequence
  Description of Artificial Sequence: Synthetic heavy chain variable region amino acid sequence
QVQLQQSGPGLAKPSQTLSLTCTVSGGPISGVDYYWSWIRQPPGKGLEWIGYIYYSGSTYYNPSLKSRVTISVDTSKKQFSLKMSSVTAADTAVYYCARDVGATPYYYYGMDVWGQGTTVTVSS

SEQ ID NO: 1220 - protein, 110 aa, Artificial Sequence
  Description of Artificial Sequence: Synthetic light chain variable region amino acid sequence
DIVLTQSPDTLSLSPGERATLSCRASQSVRSNYLAWYQHKPGQAPRLLIYGASSRVAGIPDRFSGSGSGTDFTLTISRLEPEDFAVYYCQQYGSSPPSVTFGGGTKVEIK

SEQ ID NO: 1221 - protein, 125 aa, Artificial Sequence
  Description of Artificial Sequence: Synthetic heavy chain variable region amino acid sequence
EVQLLESGGGLVQPGGSLRLSCAASGFTFSAYEMNWVRQAPGKGLEWVSYISSSGSNKHYADSVKGRFTISRDNAKNSLHLHMNSLRAEDTALYYCTRPHQEEWELLPNDAFDLWGQGTMVTVSS

SEQ ID NO: 1222 - protein, 111 aa, Artificial Sequence
  Description of Artificial Sequence: Synthetic light chain variable region amino acid sequence
QSALTQPPSASGSPGQSVTISCTGTSTDVGAYTYVSWYQQHPGKAPKLIIYEVYKRPSGVPNRFFGSKSGNTASLTVSGLQAEDEADYYCSSYGGSNNFGLFGGGTKLIVL

SEQ ID NO: 1223 - protein, 117 aa, Artificial Sequence
  Description of Artificial Sequence: Synthetic heavy chain variable region amino acid sequence
EVQLVESGVEVKKPGESLKISCRGSGYTFYNYWIAWVRQKPGKGLEYMGTIYLDDSETIYSPSFQGEVTISADKSINTAYLQWNSLKASDTANYYCARQMDFYFDVWGRGTLVTVSS

SEQ ID NO: 1224 - protein, 107 aa, Artificial Sequence
  Description of Artificial Sequence: Synthetic light chain variable region amino acid sequence
SYELMQPPSVSVSPGQTARITCSGDPLPRESAYWYQQKPGQAPVVIIFNDIERPLGIPERFSGSRSGTTVTLTISGAQAEDEADYYCQSADSRKTFVFGTGTKLTVL

SEQ ID NO: 1225 - protein, 125 aa, Artificial Sequence
  Description of Artificial Sequence: Synthetic heavy chain variable region amino acid sequence
QVQLVQSGAEVKKPGSSVKVSCKASGGTFSTDAISWVRQAPGQGLEWMGGIIPLFGTANYAQKFQGRVTITADESTSTAYMELNSLRSVDTAVYYCGRTGAFDGEVVVRPHLDLWGQGTLVTVSS

SEQ ID NO: 1226 - protein, 110 aa, Artificial Sequence
  Description of Artificial Sequence: Synthetic light chain variable region amino acid sequence
QPVLTQPASVSGSPGQSITISCTGTSSDVGGYDYVSWYQHHPGKAPKLMIYEVSNRPSGVSNRFSGSKSGNTASLTISGLQADDEAAYYCSSYTRSNTLLFGGGTKLTVL

SEQ ID NO: 1227 - protein, 122 aa, Artificial Sequence
  Description of Artificial Sequence: Synthetic heavy chain variable region amino acid sequence
EVQLVESGGGLVHPGRSLRLSCGASGFTFRSFAMHWVRQAPGKGLEWVAVISYDGSDEYYADSVKGRFTISRDNSRNTLFLQMNRLRPEDTAIYYCARAYCSTSNCPVLDYWGQGTLVTVSS

SEQ ID NO: 1228 - protein, 109 aa, Artificial Sequence
  Description of Artificial Sequence: Synthetic light chain variable region amino acid sequence
QSVLIQPASVSGSPGQSITISCTGTSSDVGGYSLVSWYQQHPGKAPKLIIFEGNKRPAGVSDRFSGSKYGDTASLTISGLQAEDEADYYCCSYAGGHSVFGGGTKVTVL

SEQ ID NO: 1229 - protein, 126 aa, Artificial Sequence
  Description of Artificial Sequence: Synthetic heavy chain variable region amino acid sequence
QVQLVESGGGVVQPGRSLRLSCAASGFTFSSYAMQWVRQAPGKGLEWVAVMTNDGDDKYYADSVRGRFTISRDNSKNTLYLQMNNLRPEDTAVYYCARDLFEWWELLGYCYAMDVWGQGTTVTVSS

SEQ ID NO: 1230 - protein, 111 aa, Artificial Sequence
  Description of Artificial Sequence: Synthetic light chain variable region amino acid sequence
QSVLTQPPSASGSPGQSVTISCTGTSSDVGAYNYVSWYQQHPGKAPKLIIYEVYKRPSGVPDRFFGSKSGNTASLTVSGLQAEDEADYYCSSYAGSNTLGVFGGGTKVTVL

SEQ ID NO: 1231 - protein, 129 aa, Artificial Sequence
  Description of Artificial Sequence: Synthetic heavy chain variable region amino acid sequence
QVQLVQSGGGLVRPGGSLRVSCAASGFIFNNYALTWVRQAPGKGLEWVSAISGSGSSTYYADSVKGRFTISRENSNNRLYLQLSGLRAEDTAVYFCARVRGLVWFEGRIDPYPNVFDYWGQGTLVTVSS

SEQ ID NO: 1232 - protein, 104 aa, Artificial Sequence
  Description of Artificial Sequence: Synthetic light chain variable region amino acid sequence
DIVLTQSPGTLSLSPGERATLSCRASQSVSNDYLAWYQQKPGQAPRLLIYDASSRAIGIPDRFSGSGSGTDFTLIISRLEPEDFAVYYCHHPGKFGQGTKVEIK

SEQ ID NO: 1233 - protein, 125 aa, Artificial Sequence
  Description of Artificial Sequence: Synthetic heavy chain variable region amino acid sequence
EVQLVESGPGLVKPSQTLSLTCTVSGGSIRSHDYYWSWIRQPPGKGLEWIGYSYYSGSTYYNPSLKSRVIISLDTSKNQFSLNLTSVTAADTAMYYCARDRPHTSSWIPGWFDPWGQGTLVTVSS

SEQ ID NO: 1234 - protein, 110 aa, Artificial Sequence
  Description of Artificial Sequence: Synthetic light chain variable region amino acid sequence
SYELTQPPSASGTPGQRVTISCSGSSSNIGSNTVSWYQQFPGKAPKLLIYSNNERPSGGPDRFSGSKSGTSASLAIGGLQSEDEANYYCAAWDDSLYAVVFGGGTKLTVL

SEQ ID NO: 1235 - protein, 126 aa, Artificial Sequence
  Description of Artificial Sequence: Synthetic heavy chain variable region amino acid sequence
QVTLKESGPGLVKPSQTLSLTCTVSGGSISGGGYYWSWIRQLPGKGLQWIGCIYDSGTTYYNPSLKSLVTISIDTSKNQFSLKLSSVTAADTAVYYCARGGSLDDFWSATWYFALWGRGTLVTVSS

SEQ ID NO: 1236 - protein, 108 aa, Artificial Sequence
  Description of Artificial Sequence: Synthetic light chain variable region amino acid sequence
EIVLTQSPGTLSLSPGERATLSCRASQSVSSNYLAWYQQKPGQAPRLLIYGASSRATGIPDRFSGSGSGTDFTLTISRLEPEDFAFYYCQQYGRSPYTFGPGTKLEIK

SEQ ID NO: 1237 - protein, 128 aa, Artificial Sequence
  Description of Artificial Sequence: Synthetic heavy chain variable region amino acid sequence
QVQLVESGPRLVKPSQTLSLTCTVSGGSIYRGDYDWNWIRQPPGKGLEWIGYISYTGNTHYNSSLKSRLSISADTSGTHFSLKLSSVTAADTAIYYCARDVGYGGNAAHYYYYAMDVWGQGTTVTVSS

SEQ ID NO: 1238 - protein, 106 aa, Artificial Sequence
  Description of Artificial Sequence: Synthetic light chain variable region amino acid sequence
ETTLTQSPATLSLSPGERATLSCRASQSVGSSLAWYQQKVGQAPRLLIYDASSRVTGIPARFSGSGSGTDFTLTISSLEPGDFAVYYCQQRSNSLTFGGGTKVEIK

SEQ ID NO: 1239 - protein, 129 aa, Artificial Sequence
  Description of Artificial Sequence: Synthetic heavy chain variable region amino acid sequence
QVQLVESGGGLVKPGGSLRLSCAASGFPLSPYALNWVRQAPGKGLEWVSSITSSSAYIYYADSVKGRFTVSRDNPTNSLYLQMNSLRAEDTAVYYCARTIPQHYYDNNGDYYNYGMDVWGQGTTVTVSS

SEQ ID NO: 1240 - protein, 107 aa, Artificial Sequence
  Description of Artificial Sequence: Synthetic light chain variable region amino acid sequence
DIVLTQSPATLSVSPGQRITLSCRASQTVRSNLAWYQQKPGQPPRLLIYGASTRATGVPARFTGSGSGTEFTLTITSLQSDDFAVYYCHQYNDRPLTFGPGTKVEIK

SEQ ID NO: 1241 - protein, 126 aa, Artificial Sequence
  Description of Artificial Sequence: Synthetic heavy chain variable region amino acid sequence
EVQLVESGPGLVKPSQTLSLTCAISGDSVSSNSAAWNWIRQSPSRGLERMGRTYYRSKWYDDYAVSVKSRIIINPDTSKNQFSLQLNSVTPEDTAVYYCARGISTFGGVIYALEIWGQGTMVTVSS

SEQ ID NO: 1242 - protein, 110 aa, Artificial Sequence
  Description of Artificial Sequence: Synthetic light chain variable region amino acid sequence
SYVLTQPASVSGSPGQSITISCTGLTSDVGGYNFVSWYQQHPGKAPKLIIYDVSHRPSGVSNRFSGSESGNTASLTISGLQAEDEAHYYCSSYTRTSIVVFGGGTKLTVL

SEQ ID NO: 1243 - protein, 126 aa, Artificial Sequence
  Description of Artificial Sequence: Synthetic heavy chain variable region amino acid sequence
EVQLLESGPGLVKPSQTLSLTCTVSGGSISSGDYYWSWVRQPPGKGLEWIGNIYHSGSTYYKPSLKSRVSISLDTSKNQFSLKLSSVTAADTAIYYCARDGGENYVWGTFRFLDVWGQGTTVTVSS

SEQ ID NO: 1244 - protein, 108 aa, Artificial Sequence
  Description of Artificial Sequence: Synthetic light chain variable region amino acid sequence
DIRLTQSPGTLSLSPGERATLSCRASQSVSSSYLAWYQQKPGQAPRLLIYGVSSRATGIPDRFSGSGSGTDFTLTINRLEPEDFALYHCQQYGSSPHTFGQGTKVEIK

SEQ ID NO: 1245 - protein, 117 aa, Artificial Sequence
  Description of Artificial Sequence: Synthetic heavy chain variable region amino acid sequence
QVQLVQSGVEVKKPGESLKISCRGSGYSFYNYWIAWVRQKPGKGLEYMGTIYLDDSDTIYSPSFQGEVTISADKSINTAYLQWNSLKASDTANYYCARQMDFYFDVWGRGTLVTVSS

SEQ ID NO: 1246 - protein, 107 aa, Artificial Sequence
  Description of Artificial Sequence: Synthetic light chain variable region amino acid sequence
SYELTQPPSVSVSPGQTARITCSGDPLPRESAYWYQQKPGQAPVVVIFNDIERPLGIPGRFSGSRSGATATLTINGAQAEDEADYYCQSADSRKTFVFGAGTKLTVL

SEQ ID NO: 1247 - protein, 126 aa, Artificial Sequence
  Description of Artificial Sequence: Synthetic heavy chain variable region amino acid sequence
QVTLKQSGPALVKPTQTLTLTCTFSGFSLSTKRMGVSWIRQPPGKALEWLARIDWDDDKYYSTSLRTRLTISKDTSKNQVVLTMTDMDPVDTATYYCARIQPYTSGGYYSYYFDYWGQGTLVTVSS

SEQ ID NO: 1248 - protein, 107 aa, Artificial Sequence
  Description of Artificial Sequence: Synthetic light chain variable region amino acid sequence
DIQVTQSPSSLSASIGDRVTITCRASQTIASYLNWYQQKPGKAPKLLIYIASSLQSGVPSRFSGSGSGTDFTLTISTLQPEDFATYYCQQSYGTPWTFGQGTKVEIK

SEQ ID NO: 1249 - protein, 134 aa, Artificial Sequence
  Description of Artificial Sequence: Synthetic heavy chain variable region amino acid sequence
QVQLQESGPGLVKPSGTLSLTCAVSGGSISSSNWWNWVRQPPGKGLEWIGEIYHSGRTNYNPSLKSRVSISIDKFKSQFSLNLNSVTAADTAVYYCARDLPGTPYDIVPGYYPGLRRHDAFDIWGQGTMVTVSS

SEQ ID NO: 1250 - protein, 110 aa, Artificial Sequence
  Description of Artificial Sequence: Synthetic light chain variable region amino acid sequence
QSVLTQPPSASGTPGQRVTMSCSGSSSNIGSDTVNWYQQLPGTAPKLLIYSNNQRPSGVPDRFSGSKSGTSASLAISGLQSEDEADYYCAAWDDSLNGWVFGGGTKLTVL

SEQ ID NO: 1251 - protein, 126 aa, Artificial Sequence
  Description of Artificial Sequence: Synthetic heavy chain variable region amino acid sequence
EVQLVESGAEVKKPGASVKVSCKASGYTFNNYDISWVRQAPGQGLEWMGWISTYNGNTNYAQKFQGRATMTTDTSTTTAYMELRSLRSDDSAIYYCARVYCGGDCHNPFFLYFDLWGRGTLVTVSS

SEQ ID NO: 1252 - protein, 106 aa, Artificial Sequence
  Description of Artificial Sequence: Synthetic light chain variable region amino acid sequence
SYVLTQPLSVSVALGQTARITCGGNNIGSKSVHWYQQKPGQAPLLVIYRDNNRPSGIPERFSGSTSGNTATLTISRAQAGDEADYSCQVWDNSDWVFGGGTKLTVL

SEQ ID NO: 1253 - protein, 123 aa, Artificial Sequence
  Description of Artificial Sequence: Synthetic heavy chain variable region amino acid sequence
QVQLVQSGAEVKKPGSSVKVSCKAFGGIFSSYAISWVRQAPGQGLEWMGGIIPIFGTTKYAQKFQGRVTITADKSTSTVYMEVSSLRFEESAVYFCARAYCSGGTWYGGADYWGQGTLVTVSS

SEQ ID NO: 1254 - protein, 106 aa, Artificial Sequence
  Description of Artificial Sequence: Synthetic light chain variable region amino acid sequence
QSVLTQPPSVSVSPGQTARITCSGDVLPKQYAYWYQQKPGQAPLLVMYKDTERPSGIPERFSGSSSVTAVTLTISGVQAEDEADYYCQSADSTQELFGGGTKLTVL

SEQ ID NO: 1255 - protein, 117 aa, Artificial Sequence
  Description of Artificial Sequence: Synthetic heavy chain variable region amino acid sequence
EVQLLESGPGLVKPSETLSLTCAVSGGSISNYYWSWIRQPPGKGLEWIAYISYSGTTNYNPSLESRVTISVDTSKNQFSLKLNSVTAADTAVYYCARHEFLVLPDVWGQGTLVTVSS

SEQ ID NO: 1256 - protein, 108 aa, Artificial Sequence
  Description of Artificial Sequence: Synthetic light chain variable region amino acid sequence
ETTLTQSPGTLSLSPGERATLSCRASQSVSSTFLAWYQQKPGQAPRLLIYAASSRATGIPDRFSGSGSGTDFTLIISRLEPEDFAVYYCQQYRSSPFSFGPGTKVEIK

SEQ ID NO: 1257 - protein, 125 aa, Artificial Sequence
  Description of Artificial Sequence: Synthetic heavy chain variable region amino acid sequence
QVQLVQSGGGVVQPGRSLRLSCAASGFTFNNYGMHWVRQAPGKGLEWVAVLSFDGINKYYADSARGRFTISRDNSKNTLYLQMNSLRAEDTALYYCAKDRQEYSSGWTHDACDIWGQGTMVTVSS

SEQ ID NO: 1258 - protein, 107 aa, Artificial Sequence
  Description of Artificial Sequence: Synthetic light chain variable region amino acid sequence
EIVMTQSPATLSVSPGERATLSCRASQNVNNNLAWYQQNPGQAPRLLIFGASTRATGIPARFSGSGSGTEFTLTISSLQSEDFAVYYCQQYNNWPRTFGQGTKLEIK

SEQ ID NO: 1259 - protein, 121 aa, Artificial Sequence
  Description of Artificial Sequence: Synthetic heavy chain variable region amino acid sequence
EVQLVESGGGLVQPGGSLRLSCEASRFKFSTFWMAWVRQAPGKGLEWVANIKQDGSETYYLDSVKGRFTISRDNAKNSLFLQMKSLRAEDTAVYYCAGLWWGDLENWFDPWGQGTLVTVSS

SEQ ID NO: 1260 - protein, 111 aa, Artificial Sequence
  Description of Artificial Sequence: Synthetic light chain variable region amino acid sequence
QSVLTQPPSVSGAPGQRVTISCTGSSSNLGTGFDVHWYRQLPGTAPQLLIYGSTNRPSGVPDRFSGSKYGTSASLAITGLQAEDEADYYCQSYDSNLRAYVFGTVTKVTVL

SEQ ID NO: 1261 - protein, 123 aa, Artificial Sequence
  Description of Artificial Sequence: Synthetic heavy chain variable region amino acid sequence
EVQLLESGAEVKKPGSSVRVSCKAFGGTFSSYAFSWVRQAPGQGLEWMGGITPMFGTENYAPNFQGRVTITADKLTTTVYMELSRLRSEDSAVYYCAREGGRLGTTMGAFDMWGQGTMVTVSS

SEQ ID NO: 1262 - protein, 107 aa, Artificial Sequence
  Description of Artificial Sequence: Synthetic light chain variable region amino acid sequence
DIRLTQSPSSLSASVGDRVTITCRASHGISSALAWYQQRPGRVPQVLIFHASTLESGVPSRFSGSGSGTDFTLTISSLQPEDFATYYCQQFNSYPYTFGQGTKVEIK

SEQ ID NO: 1263 - protein, 127 aa, Artificial Sequence
  Description of Artificial Sequence: Synthetic heavy chain variable region amino acid sequence
QVQLQESGPGLVKPSQTLSLTCTVSGGSISSGDYYWSWIRQPPGKGLEWIGYIFYSGTTYYNPSLKSRVTISLDTSQNQFSLKLSSVTAADTAVYYCARDGDEVDYVWGTRRYLDSWGRGTLVTVSS

SEQ ID NO: 1264 - protein, 108 aa, Artificial Sequence
  Description of Artificial Sequence: Synthetic light chain variable region amino acid sequence
EIVLTQSPGTLSLSPGERATLSCRASQSVSSRYLAWYQQKPGQAPRLLIHGASSRATGIPDRFSGSGSGTDFTLTISRLEPEDFAVYYCLQYGSLPKTFGQGTKVEIK

SEQ ID NO: 1265 - protein, 117 aa, Artificial Sequence
  Description of Artificial Sequence: Synthetic heavy chain variable region amino acid sequence
QVQLVQSGVEVKKPGESLKISCRGFGYSAYNYWIAWVRQKPGKGLEYMGTIYLDDSDTIYSPSFQGEVTISADRSINTAYLQWNSLKASDTANYYCARQMDFYFDVWGRGTLVTVSS

SEQ ID NO: 1266 - protein, 107 aa, Artificial Sequence
  Description of Artificial Sequence: Synthetic light chain variable region amino acid sequence
QSVLTQPPSVSVSPGQTARITCSGDPLPRESAYWYQQKPGQAPVVVIFNDIERPLGIPARFSGSRSGTTVTLTISGAQAEDEADYYCQSADSRKTFVFGPGTKLTVL

SEQ ID NO: 1267 - protein, 121 aa, Artificial Sequence
  Description of Artificial Sequence: Synthetic heavy chain variable region amino acid sequence
QVQLVQSGAEVKKPGSSVRVSCKASGGSFSSYATSWVRQAPGQGLEWMGGIIPMYDAVNYAQKFQGRVTITADESTTTAYMELSSLRSEDTAVYYCARSSGYTGTNFFDYWGQGTLVTVSS

SEQ ID NO: 1268 - protein, 108 aa, Artificial Sequence
  Description of Artificial Sequence: Synthetic light chain variable region amino acid sequence
DIQMTQSPSSVSASVGDRVTITCRASQDISSWLAWYQQKPGKAPKLLIYTASSLQSGVPSRFSGSGSGTDFTLTISRLQPEDFATYYCQQANSFPRVTFGGGTKVEIK

SEQ ID NO: 1269 - protein, 123 aa, Artificial Sequence
  Description of Artificial Sequence: Synthetic heavy chain variable region amino acid sequence
EVQLLESGGGVVRPGGSLRLSCAASGFTFDDYAMGWVRQAPGKGLEWVSGITWNAGSTAYAGSVKGRFTISRDNAKNSLFLQMNSLRAEDTAFYLCARHVDSSGPVARHFDYWGQGTLVTVSS

SEQ ID NO: 1270 - protein, 110 aa, Artificial Sequence
  Description of Artificial Sequence: Synthetic light chain variable region amino acid sequence
NFMLTQPHSVSESPGKTVTISCTRSSGSIARNYVQWYQQRPGSAPTIVIYEDNQRPSGVPDRFSGSIDSSSNSASLTISGLKTEDEADYYCQSYDPSNVVFGGGTKLTVL

SEQ ID NO: 1271 - protein, 123 aa, Artificial Sequence
  Description of Artificial Sequence: Synthetic heavy chain variable region amino acid sequence
EVQLVESGGGLVQPGGSLRLSCAASGFTVSNNYMRWVRQAPGKGLEWVSVIYSSGSTDYADSVKGRFTISRDNSKNTLYLQMNSLRAEDTAVYYCARERTLFYYDSSGFFDYWGQGTLVTVSS

SEQ ID NO: 1272 - protein, 107 aa, Artificial Sequence
  Description of Artificial Sequence: Synthetic light chain variable region amino acid sequence
ETTLTQSPGTLSLSPGERATLSCRASQSVDSSYLAWYQQKPGQAPRLLIYGASNRATGIPDRFSGSGSGTDFTLTISRLEPEDFAVYYCQQYGRSLTFGGGTKLEIK

SEQ ID NO: 1273 - protein, 127 aa, Artificial Sequence
  Description of Artificial Sequence: Synthetic heavy chain variable region amino acid sequence
QVQLVQSGAEVKTPGSSVKVSCKASGGTFRSYPITWVRQAPGQGLEWMGTVIPVFDTVNYAPKFQGRVSITADESTNTAYMELSSLRSDDSAVYYCARDLGWLRPMTTVTSPHFDYWGQGTLVTVSS

SEQ ID NO: 1274 - protein, 110 aa, Artificial Sequence
  Description of Artificial Sequence: Synthetic light chain variable region amino acid sequence
QSVLTQPASVSGSPGQSITISCTGTSSDVGGYDFVSWYQQHPGKAPKLMISEVTDRPSGVSNRFSGSKSGNTASLTISGLQAEDEADYYCTSYTSSRTYVFGTGTKLTVL

SEQ ID NO: 1275 - protein, 129 aa, Artificial Sequence
  Description of Artificial Sequence: Synthetic heavy chain variable region amino acid sequence
QVQLVQSGAEVKKPGSSVKVSCKASGGTFSSYATHWVRQAPGQGLEWMGGIIPIFGRATYAQKFQGRVTISADESTSTAYMELSSLRSEDTAVYYCARGRDDRSGDHIAFLYHYGMDVWGQGSTVTVSS

SEQ ID NO: 1276 - protein, 110 aa, Artificial Sequence
  Description of Artificial Sequence: Synthetic light chain variable region amino acid sequence
QSVLTQPPSVSAAPGQKVSISCSGSSSNIGINHASWYQHLPGTAPKLLIYDNNKRPSGIPDRFSGSKSGTSATLGISGLQTGDEAAYYCGTWDTGLSAVVFGGGTKLTVL

SEQ ID NO: 1277 - protein, 125 aa, Artificial Sequence
  Description of Artificial Sequence: Synthetic heavy chain variable region amino acid sequence
QVQLVQSGAEVKKPGSSVKVSCKASGGTLTSYGVSWVRQAPGQGLEWMGGIIPIFGTVDYAQKFQGRVTITADEPTSTAYMELSSLTSDDTAVYYCARDPWVSGPVEFYYYFDVWGRGTLVTVSS

SEQ ID NO: 1278 - protein, 108 aa, Artificial Sequence
  Description of Artificial Sequence: Synthetic light chain variable region amino acid sequence
DIVLTESPATLSLSPGERATLSCRASQSINNRYLAWYQQKPGQAPRLLIFGASSRATGIPDRFSGSGSGTDFTLTISRLEPEDFAVYYCQQYGSTPPTFGQGTKVEIK

SEQ ID NO: 1279 - protein, 122 aa, Artificial Sequence
  Description of Artificial Sequence: Synthetic heavy chain variable region amino acid sequence
EVQLVESGGGLVKPGGSLRLSCAASGFTFSSYYMNWVRQAPGKGLEWVSSISGGSSYISYADSVKGRFTISRDNAKNSLYLQMNSLRAEDTAVYYCARVDTPMVRGYYFDYWGQGTLVTVSS

SEQ ID NO: 1280 - protein, 111 aa, Artificial Sequence
  Description of Artificial Sequence: Synthetic light chain variable region amino acid sequence
QSVLTQPPSVSGAPGRRVTISCTGSSSNIGAGYDVHWYQQLPGTAPKLLIFANSNRPSGVPDRFSGSKSGTSASLAITGLQAEDEADYYCQSYDSSLSGSVFGGGTKVTVL

SEQ ID NO: 1281 - protein, 122 aa, Artificial Sequence
  Description of Artificial Sequence: Synthetic heavy chain variable region amino acid sequence
EVQLVESGGGLVKPGGSLRLSCAASGSSFSSYYMNWVRQAPGKGLEWVSSISSSSTYIDYADSVKGRFTISRDNAKNSLFLQMNSLRAEDTAVYYCARVSSPMIRGYYLDYWGQGTLVTVSS

SEQ ID NO: 1282 - protein, 111 aa, Artificial Sequence
  Description of Artificial Sequence: Synthetic light chain variable region amino acid sequence
QPVLTQPPSVSGAPGQRVTISCTGSSSNIGAGYDVHWYQQLPGTAPKLVIHGNSNRPSGVPDRFSGSKSGTSASLAITGLQGEDEADYYCQSYDSSLSGSVFGGGTKLTVL

SEQ ID NO: 1283 - protein, 118 aa, Artificial Sequence
  Description of Artificial Sequence: Synthetic heavy chain variable region amino acid sequence
EVQLVQSGAEVRKPGESLKISCKGSGYNFASYWIAWVRQMPGKGLEWMGIIFPGDSDTRYSPSFQGQVTISVDKSISTAYLQWSSLKASDTAIYYCATSKYTFGYLDWGQGTLVTVSS

SEQ ID NO: 1284 - protein, 110 aa, Artificial Sequence
  Description of Artificial Sequence: Synthetic light chain variable region amino acid sequence
NFMLTQPHSVSESPGKTVTISCTRSSGSIASNYVQWYQQRPGSAPTTVIYEDNQRPSGVPDRFSGSIDSSSNSASLTISGLKTEDEADYYCQSYDTSNQVFGTGTKVTVL

SEQ ID NO: 1285 - protein, 119 aa, Artificial Sequence
  Description of Artificial Sequence: Synthetic heavy chain variable region amino acid sequence
QVQLVQSGPEVKKPGESLKISCTLSASGLTTYWIGWVRQMPAKGLEWMGIIFPGDSDTRYSPSFQGQVTISADKSTNTAYLQWSGLKASDTAIYYCATLQTPVTGLDQWGQGTLVTVSS

SEQ ID NO: 1286 - protein, 110 aa, Artificial Sequence
  Description of Artificial Sequence: Synthetic light chain variable region amino acid sequence
NFMLTQPHSVSESPGKTVTISCTRSSGNIARSYVQWYQQRPGSAPTTVIHEDDQRPSGVPDRFSGSIDTSSNSASLTISGLKTEDEADYYCQSYDPSNYVFGTGTKVTVL

SEQ ID NO: 1287 - protein, 122 aa, Artificial Sequence
  Description of Artificial Sequence: Synthetic heavy chain variable region amino acid sequence
EVQLVESGPGLVKPSGTLSLTCAVSGGSVSSDNWWSWVRQPPGKGIEWIGEIYPSGGTNYNPSLNSRVTISVDKSKNQFSLKLNSVTAADTAIYYCARAPFDSSGYHSNSVWGQGTLVTVSS

SEQ ID NO: 1288 - protein, 112 aa, Artificial Sequence
  Description of Artificial Sequence: Synthetic light chain variable region amino acid sequence
ETTLTQSPLSLPVTPGEPASISCRSSQSLLHSNGHNYLDWYVQKPGQSPQLLIYLSSNRASGVPDRFSGSGSGTDFTLRISRVEAEDVGVYYCMQPLQTPQTFGQGTKVEIK

SEQ ID NO: 1289 - protein, 127 aa, Artificial Sequence
  Description of Artificial Sequence: Synthetic heavy chain variable region amino acid sequence
QVQLQESGPGLVKPSQTLSLTCAVSGGSISSGGYYWSWIRQHPGKGLEWIGYIYYSGSTYYNPSLKSPVTISVDTSKNQFSLKLTSVTAADTAVYYCARGDYYFDGSGRTTAAFDIWGQGTMVTVSS

SEQ ID NO: 1290 - protein, 107 aa, Artificial Sequence
  Description of Artificial Sequence: Synthetic light chain variable region amino acid sequence
DIQVTQSPSSLSASVGDRVTITCRASQSISTFLNWYQQKPGRAPKLLIYDASNLQSGVPSRVSGSGSGTDFTLTISSLHPEDFATYYCQQSYTTPYTFGQGTKVDIK

SEQ ID NO: 1291 - protein, 129 aa, Artificial Sequence
  Description of Artificial Sequence: Synthetic heavy chain variable region amino acid sequence
EVQLLESGGGLVQPGRSLRLSCTGSGFTFGDYAMNWVRQAPGKGLEWVGLIRSKDYGGTTEFAASLKGRLTISRDDSKSIAYLQMHSLKTEDSAVYYCTRAHLTDYTDINGYQYYFDYWGQGSPVTVSS

SEQ ID NO: 1292 - protein, 107 aa, Artificial Sequence
  Description of Artificial Sequence: Synthetic light chain variable region amino acid sequence
DIQMTQSPSSLSASVGDRVTITCQASQDISNFLNWYQQRPGKAPKLLIHDASNLETGVPSRFSGSGSRTEFTFTISSLQPEDIGTYYCQHYDNFPYTFGQGTKVEIK

SEQ ID NO: 1293 - protein, 123 aa, Artificial Sequence
  Description of Artificial Sequence: Synthetic heavy chain variable region amino acid sequence
EVQLVESGAGLVQPGGSLRLSCAASGFTFSTYAVSWVRQAPGKGLEWVSAISGSGASTYFADSVKGRFTISRDNSKNTLYLQMNSLRAEDTAVYYCAKARLELRPYYYGMDVWGQGTTVTVSS

SEQ ID NO: 1294 - protein, 110 aa, Artificial Sequence
  Description of Artificial Sequence: Synthetic light chain variable region amino acid sequence
QPVLTQPASVSGSPGQSITISCTGTSSDVGGYNFVSWYQQHPGKAPKLIIYEVSNRPSGVSNRFSGSKSGNTASLTISGLQAEDEADYYCSSSTLSTTYVFGTGTKVTVL

SEQ ID NO: 1295 - protein, 122 aa, Artificial Sequence
  Description of Artificial Sequence: Synthetic heavy chain variable region amino acid sequence
QVQLVQSGGGLVQPGGSLRLSCSASGFTFSSKSMHWVRQAPGKGLEYVSAIRSDGVSTYYGDSVKGRFTVSRDNAKNTVYLRMSSLRREDTAVYYCVKGPYGDFQYNWFDTWGQGTLVTVSS

SEQ ID NO: 1296 - protein, 109 aa, Artificial Sequence
  Description of Artificial Sequence: Synthetic light chain variable region amino acid sequence
ETTLTQSPATLSVSPGERATLSCRASQSVSSNLAWYQQKPGQAPRLLIYGASIRATGIPARFSGSGSGTEFTLTISSLQSEDFAVYYCQQYDNWPPGDTFGQGTKVEIK

SEQ ID NO: 1297 - protein, 128 aa, Artificial Sequence
  Description of Artificial Sequence: Synthetic heavy chain variable region amino acid sequence
EVQLVESGGGLVQPGGSLRLSCAASGFTFSSYRMNWVRQAPGKGLEWVSYIDISSSTIYYADSVKGRFTISRDNAKNSLYLQMNSLRAEDTAVYYCARDQLVWEPLIRNHYYYAMDVWGQGTTVTVSS

SEQ ID NO: 1298 - protein, 113 aa, Artificial Sequence
  Description of Artificial Sequence: Synthetic light chain variable region amino acid sequence
EIVMTQSPDSLAVSLGERATINCKSSQSVLYSSNNKNYLAWYQQKPGQPPKLLIYWASTRESGVPDRFSGSGSGTDFTLTISSLQAEDVAVYYCQQYYSSPPTFGQGTKVEIK

SEQ ID NO: 1299 - protein, 117 aa, Artificial Sequence
  Description of Artificial Sequence: Synthetic heavy chain variable region amino acid sequence
EVQLVESGVEVKKPGESLKISCRGSGYSFHNYWIAWVRQKPGKGLEYMGTIYVDDSDTIYSPSFQGEVTISADKSINTAYLQWNSLKASDTANYYCARQMDFYFDVWGRGTLVTVSS

SEQ ID NO: 1300 - protein, 107 aa, Artificial Sequence
  Description of Artificial Sequence: Synthetic light chain variable region amino acid sequence
SYELTQPPSVSVSPGQTARITCSGDPLPRESAYWYQQKPGQAPVVVIFNDIERPLGIPERFSGSRSGTTVTLTISGAQAEDEADYYCQSADSRKTFVFGSGTKLTVL

SEQ ID NO: 1301 - protein, 125 aa, Artificial Sequence
  Description of Artificial Sequence: Synthetic heavy chain variable region amino acid sequence
EVQLLESGGGLVQPGGSLRLSCAASGFTFSSYAMSWVRQAPGKGLEWVSGISGSGGTTYYADSVKGRFTISRDNSKNTLYLQMNSLRAEDTAVYYCAKDSPVNINCGGDCDVAYWGQGTLVTVSS

SEQ ID NO: 1302 - protein, 107 aa, Artificial Sequence
  Description of Artificial Sequence: Synthetic light chain variable region amino acid sequence
EIVMTQSPSSLSASVGDTVTITCQASQDISYSLNWYQQKPGKAPNLLIFDASHLQTGVPSRFSGGGDGKHFSFTISSLQPEDVATYYCQQYDSLMYTFGQGTKVEIK

SEQ ID NO: 1303 - protein, 121 aa, Artificial Sequence
  Description of Artificial Sequence: Synthetic heavy chain variable region amino acid sequence
EVQLVESGGGLVKPGGSLRLSCTASGFTFSDYYMNWIRQAPGKGLEWVSYISGDGNTIYYTDSVKGRFTISRDNAKNSLFLQMNSLRGEDSAVYYCAGPVRGYTYGIFDYWGQGALVTVSS

SEQ ID NO: 1304 - protein, 109 aa, Artificial Sequence
  Description of Artificial Sequence: Synthetic light chain variable region amino acid sequence
YYVLTQPPSVSVAPGQAARITCGGNNIGSRSVNWYQQKPGQAPVVVIYGDSVRPSGIPERFSGSNSGNTATLTFSRVEAGDEADYYCQVWETNSDHPVVFGGGTKVTVL

SEQ ID NO: 1305 - protein, 118 aa, Artificial Sequence
  Description of Artificial Sequence: Synthetic heavy chain variable region amino acid sequence
QVQLVQSGAEVKKPGASVKVSCKASGYTFTNYDINWVRQATGQGLEWMGWMNRNNGNTGYARKFQGRVTMTRNTSISTAYMELSSLRSEDTAVYYCARGGDFYAMDVWGQGTTVTVSS

SEQ ID NO: 1306 - protein, 105 aa, Artificial Sequence
  Description of Artificial Sequence: Synthetic light chain variable region amino acid sequence
SYELTQPPSVSVSPGQTASITCSGDKLGDKYASWYQQKPGQSPVLVIYQDTKRPSGVPERFSGSNSGNTATLTISGTQAVDEADYYCQVWDGSIAFGGGTKVTVL

SEQ ID NO: 1307 - protein, 123 aa, Artificial Sequence
  Description of Artificial Sequence: Synthetic heavy chain variable region amino acid sequence
EVQLVESGGGLVQPGGSLRLSCAASGFTFSTYGMNWVRQAPGKGLEWVSYIGGSGRIIYYADSVKGRFTISRDNAKNSLYLQMNSLRAEDTAVYYCARDQHIVLVTGSTPDYWGQGTLVTVSS

SEQ ID NO: 1308 - protein, 107 aa, Artificial Sequence
  Description of Artificial Sequence: Synthetic light chain variable region amino acid sequence
EIVLTQSPSSLSASVGDRVTITCRASHAISNYLAWFQQKPGKAPKSLIYAASTLQSGVPSKFSGSGSGTDFTLTISSLQPEDFATYYCQQYSSYPLTFGGGTKVEIK

SEQ ID NO: 1309 - protein, 122 aa, Artificial Sequence
  Description of Artificial Sequence: Synthetic heavy chain variable region amino acid sequence
EVQLVESGGGLVKPGGSLRLSCEASGFTLTSYSMNWVRQAPGKGLEWVSSISSSSTYIHYADSVKGRFTISRDNAKNSLYLQMNSLRAEDTAVYYCARDKVMVTKYNGMDVWGQGTTVTVSS

SEQ ID NO: 1310 - protein, 111 aa, Artificial Sequence
  Description of Artificial Sequence: Synthetic light chain variable region amino acid sequence
QSVLTQPPAVSGAPGQRVTISCTGSSSNIGAGHDVHWYQQLPGTAPKLLIYGNSNRPSGVPDRFSGSKSGTSASLAITGLQAGDEADYYCQSYDSSLSGSLFGGGTKLTVL

SEQ ID NO: 1311 - protein, 119 aa, Artificial Sequence
  Description of Artificial Sequence: Synthetic heavy chain variable region amino acid sequence
EVQLVESGGGLVKPGGSLRLSCAASGFTISGYSMDWVRQAPGKGLEWVSSISSSSSYIHYADSVKGRFTISRDNAKNSLYLQMNSLRAEDTAVYYCATNPREGGAFDIWGQGTTVTVSS

SEQ ID NO: 1312 - protein, 111 aa, Artificial Sequence
  Description of Artificial Sequence: Synthetic light chain variable region amino acid sequence
QSVLTQPPSMSGAPGQRVTISCTGSSSNIGAGYDVHWYQQLPGTAPKLLIYNNSNRPSGVPDRFSASKSGTSASLAITGLQAEDEADYYCQSYDSSLSGYVFGTGTRVTVP

SEQ ID NO: 1313 - protein, 123 aa, Artificial Sequence
  Description of Artificial Sequence: Synthetic heavy chain variable region amino acid sequence
EVQLVESGGGLVQPGGSLRLSCAASGLTFSRYSMNWVRQAPGKGLEWVSYISSTGRRIQYADSVKGRFTISRDDGKNSLYLQMNSLRAEDTAVYYCARDPLNYHDNTAYWSYWGQGTLVTVSS

SEQ ID NO: 1314 - protein, 111 aa, Artificial Sequence
  Description of Artificial Sequence: Synthetic light chain variable region amino acid sequence
NFMLTQPHSVSESPGKTVTISCTRSSGSIASNYVQWYQQRPGSAPTTVIYEDNQRPSGVPDRFSGSIDSSSNSASLTISGLKTEDEADYYCQSYDSSNPLVFGGGTKLTVL

SEQ ID NO: 1315 - protein, 125 aa, Artificial Sequence
  Description of Artificial Sequence: Synthetic heavy chain variable region amino acid sequence
QVQLQESGGGVVQPGRSLRLSCAASGFAFSDYAMDWVRQAPGKGLEWVAVISFDGSNKFYADSVKGRFTISRDNSENTLFLQMNSLRAEDTAVYYCVRDFVPCSGATCYLPPVYWGRGTLVTVSS

SEQ ID NO: 1316 - protein, 108 aa, Artificial Sequence
  Description of Artificial Sequence: Synthetic light chain variable region amino acid sequence
EIVLTQSPATLSVSPGERATLSCRASQSVSSDLAWYQQKPGQAPRLLIYGASTRATGIPARFSGSGSGTEFTLTISRLQSEDFAVYFCQQYNNWPSWTFGQGTKVEIK

SEQ ID NO: 1317 - protein, 126 aa, Artificial Sequence
  Description of Artificial Sequence: Synthetic heavy chain variable region amino acid sequence
EVQLVESGGGLVQPGGSLRLSCAASGFTFSDHWMNWVRQTPGKGLEWVANIKPDGRETYYVDSVKGRFTISRDNSKKSVYLQMNSLRAEDTAVYYCVRDGHIVVVTAVPPGFFDLWGRGTLVTVSS

SEQ ID NO: 1318 - protein, 107 aa, Artificial Sequence
  Description of Artificial Sequence: Synthetic light chain variable region amino acid sequence
DIQVTQSPSSLSASVGDRVTITCQASQDLTKYLNWYQQKPGKAPKLLIYDISNLETGVPSRFSGSGFGTEFTLTISSLQPEDVATYYCQQYQNLPYTFGQGTKVEIK

SEQ ID NO: 1319 - protein, 123 aa, Artificial Sequence
  Description of Artificial Sequence: Synthetic heavy chain variable region amino acid sequence
QVQLVQSGAEVKKPGSSVKVSCKASGGTFSSYAITWVRQAPGQGLEWMGGIIPLFGTAKYAQQFQGRVTITADESTSTAYMELSSLRSEDTAVYYCARDGEVCTNGFCWFLDWGLGTLVTVSS

SEQ ID NO: 1320 - protein, 106 aa, Artificial Sequence
  Description of Artificial Sequence: Synthetic light chain variable region amino acid sequence
DIRVTQSPSSLSASVGDRVTITCQASQDISNYLNWYQQKPGKAPKLLIYDASKLETGVPSRFSGSGSGTDFTFTISSLQPEDIATYYCQNYGNFPHFGGGTKLEIK

SEQ ID NO: 1321 - protein, 122 aa, Artificial Sequence
  Description of Artificial Sequence: Synthetic heavy chain variable region amino acid sequence
EVQLLESGAEVKKPGASVKVSCKASGYTFTDHSIHWVRQAPGRGLEWMGWFNPHTGVTDYAQKFQGWVTMTSDTSISTAYMELSSLKSDDTAIYFCARDQWETDGAYFLDYWGQGTLVTVSS

SEQ ID NO: 1322 - protein, 109 aa, Artificial Sequence
  Description of Artificial Sequence: Synthetic light chain variable region amino acid sequence
QSALTQPASVSGSPGQSITISCTGTSSDVGNFKLVSWYQQHPGKAPKLMIYEGNKRPSGVSNRFSGSKSGNTASLTISGLQAEDEADYYCCSSAVSSTFFGTGTKLTVL

SEQ ID NO: 1323 - protein, 123 aa, Artificial Sequence
  Description of Artificial Sequence: Synthetic heavy chain variable region amino acid sequence
EVQLVESGGGLVKPGGSLRLSCATSGFTFSDYYMTWIRQAPGKGLEWVSYISSSGGYTNYADSVRGRFTISRDNAKRSLYLQMNSLRAEDTAVYYCARVEFSSGDVPSLFDSWGQGTLVTVSS

SEQ ID NO: 1324 - protein, 111 aa, Artificial Sequence
  Description of Artificial Sequence: Synthetic light chain variable region amino acid sequence
QSVLTQPPSVSGAPGQRVTISCTGSSSNLGAGYHVHWYQQFPGTAPKPLIYGNTNRPSGVPDRFSGSKSGTSASLAITGVQAEDEADYYCQSYDYSLSGWVFGGGTKLTVL

SEQ ID NO: 1325 - protein, 120 aa, Artificial Sequence
  Description of Artificial Sequence: Synthetic heavy chain variable region amino acid sequence
QVQLVQSGAEVKKPGESLKISCKASGYSSTTYWIGWVRQISGKGLEWMGIIYPGDSDTRYSPSFQGQVTISADRSTKTAYLQWSSLKASDTAMYYCGTSGFGVATPFDYWGQGTLVTVSS

SEQ ID NO: 1326 - protein, 111 aa, Artificial Sequence
  Description of Artificial Sequence: Synthetic light chain variable region amino acid sequence
NFMLTQPHSVSESPGKTVTISCTRTSGSIAGNYVHWYQQRPGSAPTTVIYEDNQRPSGVPDRFSGSIDRSSNSASLTISGLKTEDEADYYCQSYASGIHGVFGGGTKVTVL

SEQ ID NO: 1327 - protein, 124 aa, Artificial Sequence
  Description of Artificial Sequence: Synthetic heavy chain variable region amino acid sequence
QVQLVQSGAAVKRPGASVKVSCKASGYTFSTNALHWVRQAPGQSLEWMGWINTDNGIPKYSERFHGRVTFTRDTSASTVYMDLSGLRSGDTAVYYCARDGSSGHWLGLSVLDNWGQGTLVTVSS

SEQ ID NO: 1328 - protein, 111 aa, Artificial Sequence
  Description of Artificial Sequence: Synthetic light chain variable region amino acid sequence
QSALIQPASVSGSPGQSITISCTGTSDDVGAYNYVSWYQQYPNKAPKLVIYEVSHRPSGVSNRFSGSKSGNTASLTISGLQAEDEADYYCSSYTRSATPYVFGTGTKLTVL

SEQ ID NO: 1329 - protein, 124 aa, Artificial Sequence
  Description of Artificial Sequence: Synthetic heavy chain variable region amino acid sequence
EVQLVESGGGVVQPGRSLRLSCAASGFIFRNYGMHWVRQAPGKGLEWVAGTSFEGRNKDYGHSVKGRFTISRDNSKDTLYLQMNSLRPEDTAVYSCAKGSSLQWSHLDWYFDLWGRGTLVTVSS

SEQ ID NO: 1330 - protein, 103 aa, Artificial Sequence
  Description of Artificial Sequence: Synthetic light chain variable region amino acid sequence
DIVMTQSPSTLSASVGDRVTITCRASQSFSSWLAWYQQKPGKAPNLLIYDASTLESGVPSRFSGSGSGTEFTLTISSLQPDDFATYYCQQERTFGQGTKVEIK

SEQ ID NO: 1331 - protein, 127 aa, Artificial Sequence
  Description of Artificial Sequence: Synthetic heavy chain variable region amino acid sequence
EVQLVQSGGGVVQPGRSLRLSCAASGFTFSSYGMHWVRQAPGKGLEWVAVISHDGNNKYYGDSVKGRFTISRDNSKNTLHLQMNSLRGDDTAVYYCGKDPLKGDCSGGSCYQRIDYWGQGTLVTVSS

SEQ ID NO: 1332 - protein, 111 aa, Artificial Sequence
  Description of Artificial Sequence: Synthetic light chain variable region amino acid sequence
NFMLTQPHSVSESPGKTVTISCTGSSGRIASNYVQWYQQRPGSAPATVIYDDNQRPSGVPDRFSGSIDSSSNSASLTISGLKTEDEADYYCQSYDRSNHVIFGGGTKLTVL

SEQ ID NO: 1333 - protein, 126 aa, Artificial Sequence
  Description of Artificial Sequence: Synthetic heavy chain variable region amino acid sequence
EVQLVESGGGLVKPGGSLRLSCAASGFTFSGFSMNWVRQAPGKGLEWVSSISSTSRYIYYADSVQGRFTISRDNAKNSLYLQMNSLRAEDTAVYYCARDPGGSASFVPYYYGMDVWGQGATVTVSS

SEQ ID NO: 1334 - protein, 110 aa, Artificial Sequence
  Description of Artificial Sequence: Synthetic light chain variable region amino acid sequence
SYELIQPPSVSVSPGQTARITCSGDALPNQYVYWYQKKPGQAPVLVIYKDTEGPLGIPERFSGSSSGTTVTLTISGVQAEDEADYYCQSADSSGTYPYVVFGGGTKLTVL

SEQ ID NO: 1335 - protein, 127 aa, Artificial Sequence
  Description of Artificial Sequence: Synthetic heavy chain variable region amino acid sequence
QVQLQESGPRLVKPSQTLSLTCTVSGGSITTGEHYWSWIRQSPGRGLEWIGYISYSGSTYYNPSLKSRVTISVDTSKTRISLNLRSVTAADSAVYYCARDQEDSDYIWGSSRVFDIWGQGTMVTVSS

SEQ ID NO: 1336 - protein, 108 aa, Artificial Sequence
  Description of Artificial Sequence: Synthetic light chain variable region amino acid sequence
ETTLTQSPGTLSLSPGERATLSCRASQNVGNNYLAWYQQKPGQAPRVLIQDASTRATGIPDRFSGSGSGTDFTLTISRLEPEDFAVYHCQQYGSAPWTFGQGTKVEIK

SEQ ID NO: 1337 - protein, 123 aa, Artificial Sequence
  Description of Artificial Sequence: Synthetic heavy chain variable region amino acid sequence
QVQLVQSGAEVKKPGSSVKVSCKASGGISSSYAISWVRQAPGQGLEWMGGIIPIFGTTNYAQKFQGRVTITADKSTSTVYMELSSLRSEDSAVYFCARAYCSGGTCYGGADYWGQGTLVTVSS

SEQ ID NO: 1338 - protein, 106 aa, Artificial Sequence
  Description of Artificial Sequence: Synthetic light chain variable region amino acid sequence
SYELTQPPSVSVSPGQTARITCSGDVLPKQYAYWYQQKLGQAPLLVMYKDTERPSGIPERFSGSSSVTAVTLTISGVQAEDEADYYCQSADSTQELFGGGTKLTVL

SEQ ID NO: 1339 - protein, 123 aa, Artificial Sequence
  Description of Artificial Sequence: Synthetic heavy chain variable region amino acid sequence
QVTLKESGGGLVKPGGSLRLSCAASGFTFSDYFMTWIRQAPGKGLEWVSYISSNSGYTKYAEDVKGRFSISRDNAKKTLFLQLNSLSAEDTAVYYCARVEFSSGDVPSLFDLWGQGTLVTVSS

SEQ ID NO: 1340 - protein, 111 aa, Artificial Sequence
  Description of Artificial Sequence: Synthetic light chain variable region amino acid sequence
QSVLTQPPSVSGAPGQRVTISCTGSSSNIGAGYHVHWYQQLPGTAPKVLIHGNNNRPSGVPDRFSGSRSGTSASLAITGLQAEDEADYYCQSYDFSLSGWVFGGGTKLTVL

SEQ ID NO: 1341 - protein, 118 aa, Artificial Sequence
  Description of Artificial Sequence: Synthetic heavy chain variable region amino acid sequence
QVQLVQSGAEVKKPGSSVKVSCKASGGTFSNHAIDWVRQAPGQGLEWMGRIIPMVGLATYTRKFQGRVTISVDKSTSTAYMELSSLISDDTAVYYCARRTPEMAWGYWGQGTTVTVSS

SEQ ID NO: 1342 - protein, 106 aa, Artificial Sequence
  Description of Artificial Sequence: Synthetic light chain variable region amino acid sequence
DIVMTQTPSSLSASVGDRVTITCQASQDIRYYVNWYQQKPGKAPKLLIYDASTLETGVPSRFSGRGSGTDFTLIISSLQPEDIATYYCQQYGDLPTFGQGTRLEIK

SEQ ID NO: 1343 - protein, 122 aa, Artificial Sequence
  Description of Artificial Sequence: Synthetic heavy chain variable region amino acid sequence
QVQLVQSGGGVVQPGRSLRLSCATSGFTFSDYAIHWVRQAPGKGLEWVAVISYDGSHKYYGDSVKGRFTISRDNSKNTLYLQMNSLRPEDTAVYYCARSRSGSYYSSAIDNWGQGTLVTVSS

SEQ ID NO: 1344 - protein, 108 aa, Artificial Sequence
  Description of Artificial Sequence: Synthetic light chain variable region amino acid sequence
DIQMTQSPSSLSASVGDRVTIACRASQGISSALAWYRQRPGKAPELLIYDASTLESGVPSRFSGYGAGTDFTLTISSLQPEDFATYYCQQFNSYPSITFGQGTKVEIK

SEQ ID NO: 1345 - protein, 126 aa, Artificial Sequence
  Description of Artificial Sequence: Synthetic heavy chain variable region amino acid sequence
QVQLQESGGGVVQPGRSLRLSCAASGFTFSSYAMHWVRQAPGKGLEWVAVISFDGTANKYYADSVKGRFAISRDNSKNTLYLQMNSLRAEDTAVYYCAKDDAIYSGGWVGDAFDLWGQGTMVTVSS

SEQ ID NO: 1346 - protein, 107 aa, Artificial Sequence
  Description of Artificial Sequence: Synthetic light chain variable region amino acid sequence
EIVLTQSPATLSVSPGERATLSCRASQGVNSNLAWYQQKPGQAPRLLMYGASTRATGIPARFSGSGSETEFTLTISSLQSEDFAVYYCQQYNNWPRTFGQGTKVDIK

SEQ ID NO: 1347 - protein, 130 aa, Artificial Sequence
  Description of Artificial Sequence: Synthetic heavy chain variable region amino acid sequence
QVQLQQSGPGLVKPSQTLSLTCAISGDSVSSDSATWNWIRQSPSRGLEWLGRAYYRSKWYYDYAPSVKSRLTINPDTSKNQFSLQLTSVTPQDTAVYFCARDLPPLEYFDGSGYYFLDHWGQGTLVTVSS

SEQ ID NO: 1348 - protein, 108 aa, Artificial Sequence
  Description of Artificial Sequence: Synthetic light chain variable region amino acid sequence
SYELTQPPSVSVAPGQTARLSCGGHNIGSKSVQWYQQKPDQAPVLVVYDDHDRPSGIPDRFSGSNSGDMATLTISRVEAGDEADYYCQVCESGRDPMVFGGGTKVTVL

SEQ ID NO: 1349 - protein, 124 aa, Artificial Sequence
  Description of Artificial Sequence: Synthetic heavy chain variable region amino acid sequence
EVQLVESGPGLVKPSGTLSLTCAVSGDSISSSNWWSWVRQPPGKGLEWIGEVSHSGNTDYNPSLKSRVTISVDKSKNQFSLKLSSVTAADTAVYYCARPSPCSGGSCYWFFDLWGRGTLVTVSS

SEQ ID NO: 1350 - protein, 107 aa, Artificial Sequence
  Description of Artificial Sequence: Synthetic light chain variable region amino acid sequence
DIRLTQSPSSLSASVGDRVTITCRASQTINAYLNWYQQRPGKAPNLLIYAASSLQSGVPSRFSGSGSGTDFTLTISSLQPEDFATYYCQQSYKTAYTFGQGTKVEIK

SEQ ID NO: 1351 - protein, 120 aa, Artificial Sequence
  Description of Artificial Sequence: Synthetic heavy chain variable region amino acid sequence
QVQLVQSGAEVKKPGESLKISCKGSGYSFSSFWIGWVRQMPGKGLEWMGIIYPGDSDTRYSPSFKGQVTISADTSISTAYLQWSSLKASDTAMYYCAKSIVGSTGSFDPWGQGTLVTVSS

SEQ ID NO: 1352 - protein, 108 aa, Artificial Sequence
  Description of Artificial Sequence: Synthetic light chain variable region amino acid sequence
DIQMTQSPSSLSASVGDRVTITCQASQDISNFLNWYQQKPGKAPKLLIYDASNLRTGVPSRFSGSGSGTEFTFTISSLQPEDIATYYCQQYHDLPPLTFGGGTKVDIK

SEQ ID NO: 1353 - protein, 135 aa, Artificial Sequence
  Description of Artificial Sequence: Synthetic heavy chain variable region amino acid sequence
QVQLVQSGAEVKKPGESLKISCKGSGYSFTSYWIGWVRQMPGKGLEWMGIIYPGDSDTRYSPSFQGQVTISADKSISTAYLQWSSLKASDTAMYYCASSRAYYDILTGYYVASAETQTKAAFDIWGQGTTVTVSS

SEQ ID NO: 1354 - protein, 106 aa, Artificial Sequence
  Description of Artificial Sequence: Synthetic light chain variable region amino acid sequence
DIQVTQSPSSLSASVGDRVTITCQASQDISNYLNWYQQKPGKAPKLLIYDASNLETGVPSRFSGSGSGTDFSFTISSLQPEDIATYYCQQYDNLITFGQGTKVEIK

SEQ ID NO: 1355 - protein, 129 aa, Artificial Sequence
  Description of Artificial Sequence: Synthetic heavy chain variable region amino acid sequence
QVQLQESGPGLVKPSQTLSLTCTVSGDSISGGEHYWSWIRQPPGKGLEWIGSIYYSGTTYYNPSLKSRLTVSVDTFKNQFSLMLSYVTAADTAVYYCARDASPAYHDYIWGSCRYFDKWGQGTLVTVSS

SEQ ID NO: 1356 - protein, 108 aa, Artificial Sequence
  Description of Artificial Sequence: Synthetic light chain variable region amino acid sequence
EIVLTQSPGTLSLSPGERATLSCRASQSVSSNYLAWYQQKPGQAPRILIHGASSRATGIPDRFSGSGSGTDFTLTVSRLEPEDFAVYYCQQYGSTPYTFGQGTKVEIK

SEQ ID NO: 1357 - protein, 127 aa, Artificial Sequence
  Description of Artificial Sequence: Synthetic heavy chain variable region amino acid sequence
EVQLVESGGGLVQPGRSLRLSCAASGFTFDDYAMHWVRQAPGKGLEWVSGISWSGDTRGYAESVKGRFTITRDNAKKYLYLQMNSLRAEDTAFYYCAKDAYYFGSGNEKFYYGMDVWGQGTTVTVSS

SEQ ID NO: 1358 - protein, 107 aa, Artificial Sequence
  Description of Artificial Sequence: Synthetic light chain variable region amino acid sequence
DIVLTQTPATLSVSPGERATLSCRASQNVISNLAWYQQKPGQAPRLLIYGASTRATGIPARFSGSGSGTEFTLTISSLQSEDFAVYYCQQYNNWPQTFGQGTKVEIK

SEQ ID NO: 1359 - protein, 126 aa, Artificial Sequence
  Description of Artificial Sequence: Synthetic heavy chain variable region amino acid sequence
QVQLVQSGAEVKKPGSSVRVSCKASGGTFSRYAISWVRQAPGQGLEWMGGVIPRFDKTNYAQKFQGRVMITADKSTSTAYMELSSLRSDDTAVYYCAGDRLDTKITHTWYGFGDFWGQGTTVTVSS

SEQ ID NO: 1360 - protein, 108 aa, Artificial Sequence
  Description of Artificial Sequence: Synthetic light chain variable region amino acid sequence
EIVLTQSPGTLSLSPGERATLSCRASQSVTSNFLAWYQQRPGQAPRLLIYGASVRAIDIPDRFSGSGSGTDFTLTISRLEPEDFAVYYCQQYGDPFRTFGQGTKVEIK

SEQ ID NO: 1361 - protein, 126 aa, Artificial Sequence
  Description of Artificial Sequence: Synthetic heavy chain variable region amino acid sequence
EVQLVESGGGVVQPGRSLRLSCAASGFTFSSYGMHWVRQAPGKGLEWVAVIWYDGNNEKYADSVKGRFTISRDNSKNTLYLQMNSLRAEDTAVYYCARPTQKYSSSWYWEDSIDYWGQGTLVTVSS

SEQ ID NO: 1362 - protein, 112 aa, Artificial Sequence
  Description of Artificial Sequence: Synthetic light chain variable region amino acid sequence
QSVLTQPPSVFGAPGQRVTISCTGSSSNIGAGYPVHWYQQLPGTAPKLLIYGNSNRPSGVPDRFSGSKSGTSASLAITGLQAEDEADYYCQSYDSSLSGGVVFGGGTKLTVL

SEQ ID NO: 1363 - protein, 125 aa, Artificial Sequence
  Description of Artificial Sequence: Synthetic heavy chain variable region amino acid sequence
QVQLVQSGAEVKKPGASVKVSCKASGYTFTGNYIHWVRQAPGQGLEWMGGINPNSGATNYARKFQGRISMTRDTSINTAYMEVSSLRSDDTATYYCARDAPPVVIPAAIHWFDAWGQGTLVTVSS

SEQ ID NO: 1364 - protein, 110 aa, Artificial Sequence
  Description of Artificial Sequence: Synthetic light chain variable region amino acid sequence
SYELTQPPSASGTPGQRVTISCSGSSSNIGRNTVNWYQQFSGTAPRLLIYRTNQRPSGVPDRFSGSKSGTSASLVISGLQSEDEADYYCASWHDTLNDVVFGGGTKLTVL

SEQ ID NO: 1365 - protein, 120 aa, Artificial Sequence
  Description of Artificial Sequence: Synthetic heavy chain variable region amino acid sequence
EVQLVESGGGVVQPGRSLRLSCAASGFTFSNYAIHWVRQAPGKGLEWVAAISYDGGNKFYADSVKGRFTISRDNSRNTLYLQMNSLRPEDTAVYYCARDRWELNYGIDVWGQGTTVTVSS

SEQ ID NO: 1366 - protein, 109 aa, Artificial Sequence
  Description of Artificial Sequence: Synthetic light chain variable region amino acid sequence
SYELMQPPSVSVSPGQTARITCSGDALPKQYAYWYQQKPGQAPVLVIYKDSERPSGIPERFSGSTSGTTVTLTISGVQAEDEADYYCQSADSSSTFFYVFGTGTKLTVL

SEQ ID NO: 1367 - protein, 123 aa, Artificial Sequence
  Description of Artificial Sequence: Synthetic heavy chain variable region amino acid sequence
EVQLVESGGGLVKPGGSLRLSCAASGFSSSSYFMNWVRQAPGKGPEWVSSISGSSSFINYADSVKGRFTISRDNAKNSLYLQMNSLRAEDTAVYYCARAVLPAGVGGYWFDSWGQGTLVTVSS

SEQ ID NO: 1368 - protein, 111 aa, Artificial Sequence
  Description of Artificial Sequence: Synthetic light chain variable region amino acid sequence
QSVVTQPPSVSGAPGQRVTISCTGSSSNIGAGYDVHWYQHLPGRAPKLLIYGNSNRPSGVPDRFSGSKSGTSASLVITGLQAEDEADYCCQSYDSSLSGAVFGGGTQLTVL

SEQ ID NO: 1369 - protein, 119 aa, Artificial Sequence
  Description of Artificial Sequence: Synthetic heavy chain variable region amino acid sequence
EVQLLESGPGLVKPSETLSLTCTVSGGSISGYYWSWIRQPPGKGLEWIGYIYHSGGSTNYNPSLKSRVTISVDTSKNQFSLKVSSVTAADTAVYYCARLARVVTTFDFWGQGALVTVSS

SEQ ID NO: 1370 - protein, 110 aa, Artificial Sequence
  Description of Artificial Sequence: Synthetic light chain variable region amino acid sequence
QPVLTQPASVSGSPGQSITISCTGTSSDVGGYNYVSWYQQKPGTAPKLMIFDVSNRPSGVSNRFSGSKSDNTASLTISGLQAEDEADYYCSSYTSSTNLVFGGGTKLTVL

SEQ ID NO: 1371 - protein, 117 aa, Artificial Sequence
  Description of Artificial Sequence: Synthetic heavy chain variable region amino acid sequence
EVQLVESGGGVVQPGGSLRLSCAASGFEFRDYAMHWVRQAPGKGLEWVALISYDGSKIHYADSVQGRFSISRDNSKNSLYLQMNSLRSEDSAKYYCVQDHWLVPAFWGQGAQVTVSS

SEQ ID NO: 1372 - protein, 110 aa, Artificial Sequence
  Description of Artificial Sequence: Synthetic light chain variable region amino acid sequence
QPVLTQPASVSGSPGQWITISCTGTSSDIGYYDYVSWYQQYPGKAPKLIIYEVSHRPSGVSNRFSGSKSGNTASLSISGLQAEDEADYYCSSYTTSNAGVFGTGTKLTVL

SEQ ID NO: 1373 - protein, 118 aa, Artificial Sequence
  Description of Artificial Sequence: Synthetic heavy chain variable region amino acid sequence
QVQLVQSGAEVKKPGESLKISCKGSGYSFTSYWIGWVRQMPGKGLEWMGIIYPGDSDTRYSPSFQGQVTISADKSTSTAYLQWSSLKASDSAMYYCARSEFSSSFDFWGQGTLVTVSS

SEQ ID NO: 1374 - protein, 111 aa, Artificial Sequence
  Description of Artificial Sequence: Synthetic light chain variable region amino acid sequence
NFMLTQPHSVSESPGKTVTISCTGSSGSIASYYVQWYQLRPGSAPTTVIYEDNQRLSGVPDRFSGSIDSSSNSASLTISGLKTEDEADYYCQSYRSGIPWVFGGGTKLTVL

SEQ ID NO: 1375 - protein, 122 aa, Artificial Sequence
  Description of Artificial Sequence: Synthetic heavy chain variable region amino acid sequence
QVQLVQSGAEVKKPGSSVKVSCKASGGTFNTYAISWVRQAPGQGLEWMGGIIPILGVSNYAQRFQGRVTFSADELTNTAYMELSSLRSEDTAVYFCARPVGAYTLGDAFEIWGRGTTVTVSS

SEQ ID NO: 1376 - protein, 112 aa, Artificial Sequence
  Description of Artificial Sequence: Synthetic light chain variable region amino acid sequence
QPVLTQSSSASASLGSSVKLTCTLSSGHSDFIIAWHQQQPGKAPRYLMKFEGNGRYSKGSGIPDRFSGSSSGADRCLTISNLQSEDEADYYCETWDSNTHVVFGGGTKLTVL

SEQ ID NO: 1377 - protein, 124 aa, Artificial Sequence
  Description of Artificial Sequence: Synthetic heavy chain variable region amino acid sequence
EVQLVESGGGLVNPGGSLRLSCVVSGFAFSSYGMNWVRQAPGKGLEWVSSISASSSYIDYADSVKGRFIISRDNAKNSLHLQMNSLRAEDTAVYYCARLGYDSSTYYTNWFDPWGRGTLVTVSS

SEQ ID NO: 1378 - protein, 111 aa, Artificial Sequence
  Description of Artificial Sequence: Synthetic light chain variable region amino acid sequence
QSVVTQEPSVSGAPGQRVTISCTGSSSNIGTGYDVHWYQQLPGAAPKLLIYGNSNRPSGVPDRISGSKSGTSASLAITGLQAEDEADYYCQSYDSSLSGYVFGTGTKVTVL

SEQ ID NO: 1379 - protein, 121 aa, Artificial Sequence
  Description of Artificial Sequence: Synthetic heavy chain variable region amino acid sequence
EVQLVESGGGLVKPGGSLRLSCAASGFKFSSYYLNWVRQAPGKGLEWVSSISGGSSYINYADSVKGRFTISRDNAKNTLDLQMSNLRAEDTAVYYCARVVGATGPLYFDLWGRGTLVTVSS

SEQ ID NO: 1380 - protein, 111 aa, Artificial Sequence
  Description of Artificial Sequence: Synthetic light chain variable region amino acid sequence
QSVLTQPPSVSGAPGQRVTISCTGSSSNIGAGYDVHWYQQFPGTAPKLLIYGNNNRPSGVPDRFSGSKSGTSASLAITGLQAEDEADYYCQSYDSSLSGYVFGAGTKVTVL

SEQ ID NO: 1381 - protein, 121 aa, Artificial Sequence
  Description of Artificial Sequence: Synthetic heavy chain variable region amino acid sequence
EVQLLESGAEVKKPGASVKVSCKASGYTFTNYGISWVRQAPGQGLEWMGWISAYNGNTNYAQKLQGRVTMTTDTSTSTAYMELRSLRSDDTAVYYCARDGGVIAAATLGYWGQGTLVTVSS

SEQ ID NO: 1382 - protein, 112 aa, Artificial Sequence
  Description of Artificial Sequence: Synthetic light chain variable region amino acid sequence
EIVLTQSPLSLPVTLGQPASISCRSSQSLVYSDGNTYLSWFQQRPGQSPRRLIYKISNRDSGVPNRFSGSGSGTDFTLKISRVEAEDVGIYYCMQGIYWPPTFGQGTKVEIK

SEQ ID NO: 1383 - protein, 123 aa, Artificial Sequence
  Description of Artificial Sequence: Synthetic heavy chain variable region amino acid sequence
QVQLVQSGAEVKKPGASVKVSCKASGYTFTTFAIHWVRQAPGQRLEWMGWINAGNGNTKYSQKFQGRVTITRDTSASTAYMELSSLRSEDTAVYYCARPEISSSSLNEKDDYWGQGTLVTVSS

SEQ ID NO: 1384 - protein, 110 aa, Artificial Sequence
  Description of Artificial Sequence: Synthetic light chain variable region amino acid sequence
QPVLTQPASVSGSPGQSITISCTGTSSDVGAYDFVSWYQQHPGKAPKFMIYEVSHRPSGVSNRFSGSKSGNTASLTISGLQAEDEADYYCSSYTTSNTLVFGGGTKLTVL

SEQ ID NO: 1385 - protein, 119 aa, Artificial Sequence
  Description of Artificial Sequence: Synthetic heavy chain variable region amino acid sequence
EVQLLESGGGLIQPGGSLRLSCAASKFTFSDYEMNWVRQAPGKGLEWLSYISSSGGIMYYADSVKGRFTISRDNAKNSLYLQMNSLRAEDTAVYFCARAGRLLSGLDVWGHGTTVTVSS

SEQ ID NO: 1386 - protein, 107 aa, Artificial Sequence
  Description of Artificial Sequence: Synthetic light chain variable region amino acid sequence
EIVLTQSPSTLSASVGDRVTITCRASQSISPWLAWYQQKPGKAPKLLIYRASSLETGVPPRFSGSGSGTEFTLTISSLQPDDFATYYCQHYNSYLYSFGQGTKVEIK

SEQ ID NO: 1387 - protein, 121 aa, Artificial Sequence
  Description of Artificial Sequence: Synthetic heavy chain variable region amino acid sequence
EVQLLESGGGLVHPGRSLRLSCAASGFTFGDYAMHWVRQAPGKGLEWVSGISWNSDTIEYADSVKGRFTISRDNAKNSLYLQMNSLRAEDTALYYCAKDFGSSWEAYFDYWGQGTLVTVSS

SEQ ID NO: 1388 - protein, 107 aa, Artificial Sequence
  Description of Artificial Sequence: Synthetic light chain variable region amino acid sequence
DIVLTQSPSYLSASVGDRVTITCRASQSISTYLNWYQQKPGKAPKLLISAASSLQSGVTSRFSGSGSGTDFSLTISSLQPEDFATYYCQQSYSTALTFGGGTKVEIK

SEQ ID NO: 1389 - protein, 129 aa, Artificial Sequence
  Description of Artificial Sequence: Synthetic heavy chain variable region amino acid sequence
EVQLVESGGGLVKPGGSLRLSCAASGFTFGTYTMNWVRQAPGKGLEWVSSISSSSSHIYYADSVKGRFTISRDNARKALYLQMNSLRPEDTAVYFCARFLGDYGGDGNTYYYYYGMDVWGQGTTVTVSS

SEQ ID NO: 1390 - protein, 111 aa, Artificial Sequence
  Description of Artificial Sequence: Synthetic light chain variable region amino acid sequence
EIVMTQSPLSLPVTPGEPASISCRSSQSLLHSNGKNYLDWYLQKPGQSPQLLIHLGSNRASGVPDRFSGSGSGTDFTLQISRVEAEDVGVYYCMQALQTPTFGGGTKLEIK

SEQ ID NO: 1391 - protein, 128 aa, Artificial Sequence
  Description of Artificial Sequence: Synthetic heavy chain variable region amino acid sequence
QVQLVQSGAEVKKPGSSVKVSCKASGGTFSSYGISWVRQAPGQGLEWMGGIIPIFGTVSYAQKFRGRLTITAHEPTSTAYMDLSSLRSEDTAVYYCARINGRGWELSSLNYYYGMDVWGQGTTVTVSS

SEQ ID NO: 1392 - protein, 108 aa, Artificial Sequence
  Description of Artificial Sequence: Synthetic light chain variable region amino acid sequence
EIVLTQSPGTLSLSPGERGTLSCRASQSVASSYLAWYQQKPGQAPRLLIYGATSRATGIPDRFSGSGSGTDFTLTISRLEPEDFAVYYCQQYGSSLFTFGGGTKVDIK

SEQ ID NO: 1393 - protein, 122 aa, Artificial Sequence
  Description of Artificial Sequence: Synthetic heavy chain variable region amino acid sequence
EVQLLESGGGLVQPGGSLRLSCAASGFSFSIYSMNWVRQAPGKGLEWISYITSTGSPTYYADSVKGRFTISRDNAKNSLYLQMSSLRAEDTAVYYCVTYCSSSSCPAEFDYWGQGTLVTVSS

SEQ ID NO: 1394 - protein, 108 aa, Artificial Sequence
  Description of Artificial Sequence: Synthetic light chain variable region amino acid sequence
EIVLTQSPATLSLSPGERATLSCRASQSVNSYLAWYQQKPGQAPRLLIYDASNRATGIPARFSGSGSGTDFTLTISSLEAEDFAVYYCQHRNNWPALTFGGGTKVEIK

SEQ ID NO: 1395 - protein, 126 aa, Artificial Sequence
  Description of Artificial Sequence: Synthetic heavy chain variable region amino acid sequence
EVQLVESGGNLVQPGGSLRLSCAASGFTFSSYVMNWVRQAPGKGLEWVSGISGSGGTSYYADSVKGRFTISRDNSNNTLYLQMKSLRAEDTAVYYCAKDPRFQKWLIEGTNWFDSWGQGTLVTVSS

SEQ ID NO: 1396 - protein, 107 aa, Artificial Sequence
  Description of Artificial Sequence: Synthetic light chain variable region amino acid sequence
DIQVTQSPSSLSASVGDRVTITCRASQDVSNYLAWFQQKPGTAPKSLIYAASILQSGVPSKFRGSGSGTDFSLTISSLQPEDFATYYCQQYRSFPPTFGGGTKVEIK

SEQ ID NO: 1397 - protein, 119 aa, Artificial Sequence
  Description of Artificial Sequence: Synthetic heavy chain variable region amino acid sequence
EVQLVESGGGLVQPGGSLRLSCAASGFTFSSNAMSWVRQAPGKGLEWVSYISGGSATKSYADSVKGRFTISRDNSKNTLYLQMKSLRAEDTAVYYCVGGSAYYSGFDYWGQGTLVTVSS

SEQ ID NO: 1398 - protein, 108 aa, Artificial Sequence
  Description of Artificial Sequence: Synthetic light chain variable region amino acid sequence
DIVMTQSPSSLSASVGDRVTISCRASQDIRNYLAWYQQKPGKVPNLLIYAASTLESGVPSRFSGSGYGTDFTLTISGLQPEDVATYYCQKYDSAPPFTFGPGTKVDIK

SEQ ID NO: 1399 - protein, 118 aa, Artificial Sequence
  Description of Artificial Sequence: Synthetic heavy chain variable region amino acid sequence
QVQLVESGAEVKKPGESLKISCRDSGYSFSSFWIGWVRQMPGKGLEWVGIIYPGDSDIRYSPSFQGRVTISADKSISTAYLQWRSLKASDSAMYYCARSEKLGSFDRWGQGTLVTVSS

SEQ ID NO: 1400 - protein, 107 aa, Artificial Sequence
  Description of Artificial Sequence: Synthetic light chain variable region amino acid sequence
DIQMTQSPSSLSASVGDRVTITCQANRDISNCLNWYQQRPGKAPELLIYDASYLETGVPSRFTGSGSGTDFTFTISSLQPEDIATYYCQQYDNLLFTFGPGTKVEIK

SEQ ID NO: 1401 - protein, 122 aa, Artificial Sequence
  Description of Artificial Sequence: Synthetic heavy chain variable region amino acid sequence
QVQLVQSGAEVKKPGASVKVSCKASGYTFTNYGISWVRQAPGQGLEWMGWISAYNGNTNYAQKFQDRVTMTTDTSTSTAYMELRSLRYDDTAVYYCARDTPGEYASAMFDHWGQGTLVTVSS

SEQ ID NO: 1402 - protein, 112 aa, Artificial Sequence
  Description of Artificial Sequence: Synthetic light chain variable region amino acid sequence
DIVMTQSPLSLPVTLGQPASISCRSSQSLVYSDGNTYLSWFQQRPGQSPRRLIYKVSNRDSGVPDRFSGSGSGTDFTLKISGVEAEDVGVYYCMQGTHWPPTFGQGTKLEIK

SEQ ID NO: 1403 - protein, 117 aa, Artificial Sequence
  Description of Artificial Sequence: Synthetic heavy chain variable region amino acid sequence
EVQLLESGGGLAQPGRSLKVSCAASGVTVTSTYMGWVRQAPGKGLQWVSVIYSDGTTYYADSVKGRFTISRDHYKNTLYLQMNSLRAEDTALYYCARGNRRTDFGYWGQGTLVTVSS

SEQ ID NO: 1404 - protein, 106 aa, Artificial Sequence
  Description of Artificial Sequence: Synthetic light chain variable region amino acid sequence
EIVMTQSPSTLSASVGDRVTITCRASQTISNWLAWYQQKPGKAPKLLIYQASTLESGVPSRFSGSGSGTEFTLTISSLQPDDFATYYCQQYNTYYTFGPGTKVEIK

SEQ ID NO: 1405 - protein, 126 aa, Artificial Sequence
  Description of Artificial Sequence: Synthetic heavy chain variable region amino acid sequence
QVTLKESGPALVKPTQTLTLTCTFSGFSLSTSRTRVSWIRQPPGKALEWLARVDWDDDKFYNPVLKTRLSISKDPSKNQVVLTMTNVDPVDTATYYCVRMAHYGSGGYYVEYFQDWGQGTLVTVSS

SEQ ID NO: 1406 - protein, 108 aa, Artificial Sequence
  Description of Artificial Sequence: Synthetic light chain variable region amino acid sequence
DIQLTQSPASLSASAGDRVTITCRASQNINRYLNWYQQQSGKAPKLLIYAASILQSGVPSRFSGSGSGTDFTLTITSLQPEDFAIYYCQQSYTTPKYTFGQGTKVEIK

SEQ ID NO: 1407 - protein, 124 aa, Artificial Sequence
  Description of Artificial Sequence: Synthetic heavy chain variable region amino acid sequence
EVQLVESGGGLVKPGGSLRLSCAASGFKFSSYTMNWVRQAPGKGLEWVSSITGGSSFINYADSVKGRFTISRDNAKNSLYLQMVSLRAEDTAVYYCARDLSSHITIFGAVSDYWGRGTTVTVSS

SEQ ID NO: 1408 - protein, 110 aa, Artificial Sequence
  Description of Artificial Sequence: Synthetic light chain variable region amino acid sequence
QSVLTQPPSVSGAPGQRVTISCTGSSSNIGAGYDAHWFQQLPGSAPKLLIYANTNRPSGVPDRFSGSKSGTSASLAITGLQAEDEADYYCQSYDSTLSVVFGGGTKLTVL

SEQ ID NO: 1409 - protein, 125 aa, Artificial Sequence
  Description of Artificial Sequence: Synthetic heavy chain variable region amino acid sequence
QVQLVESGGGLVKPGGSLRLSCAASGFTFSSYSMNWVRQAPGKGLEWVSSISAGSSYIYYADSLKGRFTISRDNAKNSLYLQMNSLRAEDTAVYYCARVNTHYYDSSAYHNFDSWGQGTLVTVSS

SEQ ID NO: 1410 - protein, 112 aa, Artificial Sequence
  Description of Artificial Sequence: Synthetic light chain variable region amino acid sequence
QPVVTQPPSVSGAPGQRVTISCTGSSSNIGAGYDVHWYQQLPGTAPKLLIYGNTNRPSGVPERFSGSKSGTSASLAITGLQAEDEADYYCQSYDTNLSAPWVFGGGTKLTVL

SEQ ID NO: 1411 - protein, 127 aa, Artificial Sequence
  Description of Artificial Sequence: Synthetic heavy chain variable region amino acid sequence
EVQLVESGGGLVKPGGSLRLSCAASGLSFTDAWMGWVRQAPGKGLEWVGHIKKKTDYGPTAYAAPVRGRFTVSRDDSKNTLYLQMTSLKTEDTAVYYCITERGYNFGYNDYFGVDVWGQGTLVTVSS

SEQ ID NO: 1412 - protein, 109 aa, Artificial Sequence
  Description of Artificial Sequence: Synthetic light chain variable region amino acid sequence
QPGLTQPPSVSVSPGQTARITCSGDALPKKYAYWYQQKSGQAPVMIIYEDNKRPSGIPERFSGSTSGTMATLTISGAQMEDEADYYCFSTDSGDDQSGVFGGGTRLTVL

SEQ ID NO: 1413 - protein, 125 aa, Artificial Sequence
  Description of Artificial Sequence: Synthetic heavy chain variable region amino acid sequence
EVQLVESGGGLVQPGRSLRLSCAASGFTFDDYAMHWVRQAPGKGLEWVSGISWNSGSVGYSDSVKGRFTISRDNAKSSLYLQMNNLRAEDTALYYCARDMAHTQDYFDTSEYDSWGQGTLVTVSS

SEQ ID NO: 1414 - protein, 110 aa, Artificial Sequence
  Description of Artificial Sequence: Synthetic light chain variable region amino acid sequence
QPVLTQPASVSGSPGQSITISCTGTSSDIGAYNYVSWYQQHPGKAPKLVVYEVNNRPSGISNRFSGSKSGNTASLTISGLQAEDEADYYCSSYTVSATLVFGGGTKLTVL

SEQ ID NO: 1415 - protein, 122 aa, Artificial Sequence
  Description of Artificial Sequence: Synthetic heavy chain variable region amino acid sequence
EVQLLESGGGVVQPGRSLRLSCAASGFTFSSYAMHWVRQAPGKGLEWVAVISYDGSNKYYADSVKGRFTISRDNSKNTLYLQMNSLRAEDTAVYYCARVPCSSTSCYTTDYWGQGTLVTVSS

SEQ ID NO: 1416 - protein, 109 aa, Artificial Sequence
  Description of Artificial Sequence: Synthetic light chain variable region amino acid sequence
QPVLTQPPSVSGSPGQSVTISCTGTSSDVGSYNRVSWYQQPPGTAPKLMIYEVSNRPSGVPDRFSGSKSGNTASLTISGLQAEDEADYYCSSYTSSSPVFGGGTKVTVL

SEQ ID NO: 1417 - protein, 129 aa, Artificial Sequence
  Description of Artificial Sequence: Synthetic heavy chain variable region amino acid sequence
QVQLVESAAEVKRPGASLKVSCKASGYTFIDYDISWVRQAPGQGLDWMGWISTYDGSAKYPENLQARVAMTTDTSTSTAYMELESLTSDDTAVYYCARARRGSSGWVSTTGPTPFFDYWGRGTLVTVSS

SEQ ID NO: 1418 - protein, 109 aa, Artificial Sequence
  Description of Artificial Sequence: Synthetic light chain variable region amino acid sequence
SYELTQPPSVSVSPGQTARITCSGDALPKRYAYWYQQKSGQAPVLVIYEDNKRPSGIPERFSGSSSGTVATLTISGAQVEDEADYSCYSTDATGNHRGLFGGGTKLTVL

SEQ ID NO: 1419 - protein, 120 aa, Artificial Sequence
  Description of Artificial Sequence: Synthetic heavy chain variable region amino acid sequence
QVQLVESGGGLVKPGGSLRLSCAASGFTFSSYSMNWVRQAPGKGLEWVSSISSSSSYIYYADSVKGRFTISRDNAKNSLYLQMNSLRAEDTAVYYCARDPSSSWNRNDYWGQGTLVTVSS

SEQ ID NO: 1420 - protein, 111 aa, Artificial Sequence
  Description of Artificial Sequence: Synthetic light chain variable region amino acid sequence
QSVLIQPASVSGSPGQSITISCTGTSSDVGGYNYVSWYQQHPGKAPKLMIYDVSNRPSGVSNRFSGSKSGNTASLTISGLQAEDEADYYCSSYTSSSTLVVFGGGTKVTVL

SEQ ID NO: 1421 - protein, 122 aa, Artificial Sequence
  Description of Artificial Sequence: Synthetic heavy chain variable region amino acid sequence
QVQLVQSGAEVREPGASVKVSCKPSGYTFANYGISWVRQAPGQGLEWMAWISAYNGNTNYAPKVQGRVSVTTDSSTGIGYMELRSLRSDDTAVYYCVRDTPAIAGAATLDFWGQGTLVTVSS

SEQ ID NO: 1422 - protein, 112 aa, Artificial Sequence
  Description of Artificial Sequence: Synthetic light chain variable region amino acid sequence
DIVLTQSPLSLAVTPGQSASISCRSRQSHVFSDGNTYVSWFQQRPGRSPRRLIYRVSYRDSGVPDRFSGSGSGSDFTLRISRVEAEDVGVYYCMQGTHWPRTFGQGTKLEIK

SEQ ID NO: 1423 - protein, 126 aa, Artificial Sequence
  Description of Artificial Sequence: Synthetic heavy chain variable region amino acid sequence
EVQLLESGPAVVKPTQTLTLTCTVSGLSLSSPRMSVSWIRQPPGKGLEWLARIDWDGDKYYGTSLKTRLSISKDTSKNQVVLTMTNMDPVDTGTYYCAQTSIYASNAYYLARLDPWGQGMLVTVSS

SEQ ID NO: 1424 - protein, 107 aa, Artificial Sequence
  Description of Artificial Sequence: Synthetic light chain variable region amino acid sequence
EIVMTQSPSLLSASVGDRVTITCRASQNIATYLNWYQQKPGKAPRLLIYAASNLQSGVPSGFSGSGSGTVFTLTISSLQPEDFATYFCQQSYETSLTFGGGTKVEIK

SEQ ID NO: 1425 - protein, 119 aa, Artificial Sequence
  Description of Artificial Sequence: Synthetic heavy chain variable region amino acid sequence
QVQLVESGPGLVKPSETLSLTCTVSGGSIGGYYWSWIRQPPGKGLEWIGYMYYSGSTNYNPSLKSRVTMSVDTSKNQFSLKLTSVTAADTAVYYCARVLRFLVGGMDVWGQGTTVTVSS

SEQ ID NO: 1426 - protein, 110 aa, Artificial Sequence
  Description of Artificial Sequence: Synthetic light chain variable region amino acid sequence
QSVLIQPASVSGSPGQSITISCTGTSSDVGGYNYVSWYQQHPGKAPKLIIYEVSNRPSGVSNRFSGSKSGNTASLTISGLQAEDEADYYCNSYTTIATLVFGTGTKVTVL

SEQ ID NO: 1427 - protein, 129 aa, Artificial Sequence
  Description of Artificial Sequence: Synthetic heavy chain variable region amino acid sequence
QVQLVQSGAEVKKPGSSVKVSCKASGGTFSSYAISWVRQAPGQGLEWMGGIIPIFGTVNYAQKFPGRVTITADESTSTAYMELSSLRSEDTAIYYCARDSPSYTGSLLFSQYYYGMDVWGQGTTVTVSS

SEQ ID NO: 1428 - protein, 110 aa, Artificial Sequence
  Description of Artificial Sequence: Synthetic light chain variable region amino acid sequence
QPVLTQPASVSGSPGQSITISCTGTSSDVGGYDYVSWYQHHPGKAPKLMIYEVSNRPSGVSNRFSGSKSGNTASLTISGLQAEDEADYYCSSFTTSSPRVFGTGTKLTVL

SEQ ID NO: 1429 - protein, 122 aa, Artificial Sequence
  Description of Artificial Sequence: Synthetic heavy chain variable region amino acid sequence
QVQLVQSGAEVKKPGASVRVSCTASGYRFFTYGITWVRQAPGQGLEWMGWISAYNGNTKFAQKFQGRLTMTTDAPTSTADMELRGLRSDDTAVYYCAREEGGYHGTGSNNYWGQGTLVTVSS

SEQ ID NO: 1430 - protein, 110 aa, Artificial Sequence
  Description of Artificial Sequence: Synthetic light chain variable region amino acid sequence
QSVLTQPPSVSAAPGQKVTISCSGSGSNVGGNDVSWYQQFPGTAPKLLIYDNSKRPSGIPDRFSGSKSGTSATLVITGLQTGDEADYYCGTWDSSLSVGVFGTGTKLTVL

SEQ ID NO: 1431 - protein, 123 aa, Artificial Sequence
  Description of Artificial Sequence: Synthetic heavy chain variable region amino acid sequence
QVQLVQSGAEVKKPGYSVKVSCKASGGTFSTFGISWVRQAPGLGLEWMGGIIPLFGTADYSKKYQGRVTITADESTSTGYMELNSLTPEDTAVYYCARSPGHLWSRYDAFEVWGQGTTVTVSS

SEQ ID NO: 1432 - protein, 111 aa, Artificial Sequence
  Description of Artificial Sequence: Synthetic light chain variable region amino acid sequence
QPVLTQPRSVSGSPGQSVTISCSGTSSDVGGYNYVSWYQQYPGKAPKLIIYDVNKRPSGVPDRFSGSKSDNTASLTISGLQADDESDYFCCSYAGSHTFEVFGTGTKVTVL

SEQ ID NO: 1433 - protein, 122 aa, Artificial Sequence
  Description of Artificial Sequence: Synthetic heavy chain variable region amino acid sequence
EVQLLESGGGAVQPGRFLRLSCAASGFTFRSYGMHWVRQAPGKGLEWVAVISYDGSDKYYADSVKGRFTISRDNSKNTLFLLMNGLRAEDAAVYYCAKDIASAGTLRGSDVWGQGTMVTVSS

SEQ ID NO: 1434 - protein, 110 aa, Artificial Sequence
  Description of Artificial Sequence: Synthetic light chain variable region amino acid sequence
QPVLTQPRSVSGSPGQSVTISCTGTSSDVGGFNYVSWYQQHPGKAPKLMIYDVRVRPSGVPDRFSGSKSGNTASLTISGLQGEDEADYYCCSYTVTYTLVFGGGTKLTVL

SEQ ID NO: 1435 - protein, 125 aa, Artificial Sequence
  Description of Artificial Sequence: Synthetic heavy chain variable region amino acid sequence
EVQLVESGGGLVQPGRSLRLSCEASGFTFDDYAMHWVRQTPGKGLEWVSGISWNSGSIVYADSVKGRFTISRDNAKNSLYLQMHSLRPEDTALYYCAKDNYTFGNYYYYYGMDVWGQGTTVTVSS

SEQ ID NO: 1436 - protein, 107 aa, Artificial Sequence
  Description of Artificial Sequence: Synthetic light chain variable region amino acid sequence
EIVLTQSPVTLSVSPGERATLSCRASQNVISNLAWYQQKPGQAPRLLIYGASTRATGIPARFSGSGSGTEFTLTISSLQSEDFAVYYCQQYNNWPLSFGGGTKVEIK

SEQ ID NO: 1437 - protein, 130 aa, Artificial Sequence
  Description of Artificial Sequence: Synthetic heavy chain variable region amino acid sequence
EVQLLESGGGLVKPGGSLRLSCAASGFTFSSYSLNWVRQAPGKGLEWVSSISSSGTYIFYADSVKGRFTISRDNAKDSLFLQMNSLRAEDTAVYYCARARDMGNYDILTGYYRVDAFDIWGQGTMVTVSS

SEQ ID NO: 1438 - protein, 110 aa, Artificial Sequence
  Description of Artificial Sequence: Synthetic light chain variable region amino acid sequence
QSVLTQPPSASKTPGQRVTISCSGSSSNIGGNTVNWYQQLPGTAPKLLIYTNDQRPSGVPDRFSGSKSGTSASLAISGLQSEDEADYYCAAWDDSLNGWVFGGGTKLTVL

SEQ ID NO: 1439 - protein, 125 aa, Artificial Sequence
  Description of Artificial Sequence: Synthetic heavy chain variable region amino acid sequence
EVQLLESGGGVVQPGRSLRLSCAASGFTFSDYAMHWVRQAPGKGLEWVALISFDGSNEYYADSVKGRFTISRDNSRNTVYLQVNTLRPDDTAVFYCARDSHLRLTTRGWGSFDYWGQGTLVTVSS

SEQ ID NO: 1440 - protein, 110 aa, Artificial Sequence
  Description of Artificial Sequence: Synthetic light chain variable region amino acid sequence
NFMLTQPHSVSESPGKTVTIACTRSSGSIARNYVQWYQQRPGRSPTMVIYEDNQRPSGVPDRFSGSIDTSSNSASLTISGLKTEDEADYYCQPYDPDNLVFGGGTKLTVL

SEQ ID NO: 1441 - protein, 125 aa, Artificial Sequence
  Description of Artificial Sequence: Synthetic heavy chain variable region amino acid sequence
QVQLVQSGGEVKKPGASVKVSCKASGYTFTHYGISWARQAPGQGIEWMGWINVHNGNTEYAQRFQGRVTMTTDTSTNTAYMEMTSLTSDDTAVYYCARDKIVVVVVPNYHGMDVWGQGTLVTVSS

SEQ ID NO: 1442 - protein, 113 aa, Artificial Sequence
  Description of Artificial Sequence: Synthetic light chain variable region amino acid sequence
EIVLTQSPDSLAVSLGERATINCKSSQSVLYRANNRNYLAWYQQKPGQPPKLLIYWASTRESGVPDRFSGSGSGTDFTLTISSLQAEDVALYYCHQYHSSPRTFGQGTKVDIK

SEQ ID NO: 1443 - protein, 120 aa, Artificial Sequence
  Description of Artificial Sequence: Synthetic heavy chain variable region amino acid sequence
QVQLVQSGAEMRRPGSSVRLPCKASGYTFVSHTIVWVRQAPGQGLEWMGGIIPSLRTPNYAQNFQDRLTITADESARTAYMELSSLTSNDTAVYYCARETFQGGYYLDYWGQGTLVTVSS

SEQ ID NO: 1444 - protein, 108 aa, Artificial Sequence
  Description of Artificial Sequence: Synthetic light chain variable region amino acid sequence
EIVMTQSPGTLSVSPGDTAALSCRASQSVGRNLAWYQQKPGQAPRLLIFGASTRAADIPGRFSGSGSGTEFTLTITSLQSEDFAVYYCQQYNKWPPYTFGQGTKVEIK

SEQ ID NO: 1445 - protein, 121 aa, Artificial Sequence
  Description of Artificial Sequence: Synthetic heavy chain variable region amino acid sequence
QVQLVQSGTEVKNPGASVKVSCKASGYTFSNYGITWVRQAPGQGLEWMAWISAYNGNILYAQNVQGRVTMTTDTSTSTGYMELRSLRSDDTAVYYCARDAPAGTLTLLDYWGQGTLVTVSS

SEQ ID NO: 1446 - protein, 112 aa, Artificial Sequence
  Description of Artificial Sequence: Synthetic light chain variable region amino acid sequence
DIVMTQTPLSLPVTLGQPASISCRPSQSLVYSDGNTYLNWFQQRPGQSPRRLIYKVSNRDSGVPDRFSGSGSGTDFTLRISRVEAEDVGVYYCMQGSHWPYAFGQGTKVEIK

SEQ ID NO: 1447 - protein, 130 aa, Artificial Sequence
  Description of Artificial Sequence: Synthetic heavy chain variable region amino acid sequence
EVQLVESGGGLVKPGGSLRLSCAVSGFTFSDYTMNWVRQAPGKGLEWVSSISGSGTYIYYGDSVKGQFTISRDNAKNSLYLQMNSLRAEDTAVYYCARELPAKTIFGVDFLGGTTAYDCWGQGTPVTVSS

SEQ ID NO: 1448 - protein, 106 aa, Artificial Sequence
  Description of Artificial Sequence: Synthetic light chain variable region amino acid sequence
EIVLTQSPATLSVSPGERATLSCRASQSVSSNLAWYQQKPGQAPRLLIYSATTRATGVPARFSGSGSGTEFTLTISSLRSEDFAVYYCQQYNNGGTFGPGTKVEIK

SEQ ID NO: 1449 - protein, 123 aa, Artificial Sequence
  Description of Artificial Sequence: Synthetic heavy chain variable region amino acid sequence
EVQLVQSGPGLVKPSETLSLTCSVSGASISRYHYYWGWIRQSPGKGLEWIGTIYYSGTTYYNPSLESRVTISADTSKNQVSLKLTSVTAADTAVYYCARGSGDTALDFSFEYWGQGALVTVSS

SEQ ID NO: 1450 - protein, 107 aa, Artificial Sequence
  Description of Artificial Sequence: Synthetic light chain variable region amino acid sequence
DIQLTQSPSFLSASVGDRITITCRASQGISNSLAWYQQKPGKAPKLLIYAASTLQFAVPSRFSGSGSGTEFTLTISSLQPEDFATYYCQQLDSYPLTFGGGTKLEIK

SEQ ID NO: 1451 - protein, 126 aa, Artificial Sequence
  Description of Artificial Sequence: Synthetic heavy chain variable region amino acid sequence
EVQLLESGGGLVQPGRSLRLSCAASGFTFDDYAMHWVRQAPGKGLEWVSGISWHSGSIVYADSVKGRFTISRDNAKNSLYLQMSSLRAEDTALYYCVKDHYNWNDNPHFHYGLDVWGQGTTVTVSS

SEQ ID NO: 1452 - protein, 107 aa, Artificial Sequence
  Description of Artificial Sequence: Synthetic light chain variable region amino acid sequence
EIVLTQSPATLSVSPGERATLSCRASQSVISNLAWYQQKPGQAPRLFIYGASTRATGIPARFSGSGSGTEFTLTISSLQSEDFAVYFCQQYNNWPITFGQGTRLEIK

SEQ ID NO: 1453 - protein, 119 aa, Artificial Sequence
  Description of Artificial Sequence: Synthetic heavy chain variable region amino acid sequence
EVQLVESGGGVVQPGKSLRLSCAASGFTFSSYAMHWVRQAPGKGLEWVSVIWYEDSDKYYGDSVKGRFTISRDNSKNTLYLQMNSLRAEDTAVYYCARKSGGFGGLDYWGQGTLVTVSS

SEQ ID NO: 1454 - protein, 112 aa, Artificial Sequence
  Description of Artificial Sequence: Synthetic light chain variable region amino acid sequence
DIVMTQSPLSLPVTPGEPASISCKSSQSLLTANGYNYLDWYVQKPGQSPHVLISLGSNRASGVPDRFSGSGSGTDFTLKISRVEAEDVGVYYCMQAIETPITFGQGTRLEIK

SEQ ID NO: 1455 - protein, 119 aa, Artificial Sequence
  Description of Artificial Sequence: Synthetic heavy chain variable region amino acid sequence
EVQLVESGPRLVKPSQTLSLTCTVSGGSIGTGDYHWTWIRQSPGKGLEWIGNIYYNGRTFYNPSLKGRGSISRDASKNQFSLNLSSVSAADTAVYYCARDRAAKGFDHWGQGTLVTVSS

SEQ ID NO: 1456 - protein, 107 aa, Artificial Sequence
  Description of Artificial Sequence: Synthetic light chain variable region amino acid sequence
DIQLTQSPSTLSASVGDRVTITCRASQNINGWLAWYQQKPGRVPKLLIYKASTLESGVPSRFSGSASGTEFTLTINNLLPDDFATYYCQQYNDYPYTFGQGTKVEIK

SEQ ID NO: 1457 - protein, 124 aa, Artificial Sequence
  Description of Artificial Sequence: Synthetic heavy chain variable region amino acid sequence
QVQLVQSGAEVKRPGSSVKVSCKAFGGSFSNYAINWVRQAPGQGLEWMGGISPVLGTAIYAKRFQGKVTITADKFANTAYMDLSSLRFEDTAVYYCARSPPHVEFPLTKWFDPWGQGTLVTVSS

SEQ ID NO: 1458 - protein, 108 aa, Artificial Sequence
  Description of Artificial Sequence: Synthetic light chain variable region amino acid sequence
EIVMTQSPGTLSLSPGERATLSCRASQSVNSGYLAWYQHKPGRAPRLLIYGASNRATGVPDRFSGSGSGTDFTLTISRLEPEDFAVYYCQQYDNSLFTFGPGTKVDIK

SEQ ID NO: 1459 - protein, 122 aa, Artificial Sequence
  Description of Artificial Sequence: Synthetic heavy chain variable region amino acid sequence
EVQLLESGGGLVQPGGSLRLSCAASGFTYYSYAMNWVRQAPGKGLEWVSAISGGGDNTFYAESVKGRFTISRDNAKNTLYLQMDSLRAEDTAVYYCAKDLQGYTSLYCFDYWGQGTLVTVSS

SEQ ID NO: 1460 - protein, 108 aa, Artificial Sequence
  Description of Artificial Sequence: Synthetic light chain variable region amino acid sequence
EIVMTQSPATLSLSPGERAALSCRASQSVFNYVAWYQQKPGQAPRLLIYDTSKRATGIPARFSGSGSGTDFTLTISSLEPEDFAVYYCQHRYNWPGLIFGGGTKVEIK

SEQ ID NO: 1461 - protein, 124 aa, Artificial Sequence
  Description of Artificial Sequence: Synthetic heavy chain variable region amino acid sequence
EVQLLESGGGLVQPGGSLRLSCAASGFTFSTYAMNWVRQAPGKGLEWVSTISGSGGSTYYGDSVKGRFTISRDNSKNTLYLQMNSLRAEDTAVYYCAKAPTPWCSGGSCYVSYWGQGTLVTVSS

SEQ ID NO: 1462 - protein, 108 aa, Artificial Sequence
  Description of Artificial Sequence: Synthetic light chain variable region amino acid sequence
DIVMTQTPGTLSLSPGERGTLSCRASQSVSSSYLAWYQQKPGQAPRLLIYGASSRATGIPDRFGGSGSGTDFTLTISTLEPEDFAVYYCQQYQSSPWTFGQGTKLEIK

SEQ ID NO: 1463 - protein, 127 aa, Artificial Sequence
  Description of Artificial Sequence: Synthetic heavy chain variable region amino acid sequence
TVQLVESGAEVKSPGSSVRVSCQASGGSSNSYAISWVRQAPGQGLEWMGMISPLFGTTRFSQRFQGRVTITADKSTSTAYMELSSLNSEDTALYYCARGRFDFWSGPTRFYYTMDVWGQGTMVTVSS

SEQ ID NO: 1464 - protein, 110 aa, Artificial Sequence
  Description of Artificial Sequence: Synthetic light chain variable region amino acid sequence
QSVLIQPASVSGSPGQSITISCSGTSSDIGGYNYVSWYQQHPGKAPKLLISDVTDRPSGISDRFSGSKSGTSASLTISGLQADDEADYYCTSYTTSSTWVFGGGTKLTVL

SEQ ID NO: 1465 - protein, 123 aa, Artificial Sequence
  Description of Artificial Sequence: Synthetic heavy chain variable region amino acid sequence
EVQLVESGGGLVKPGGSLRLSCAASGFSFSSYRVNWVRQAPGKGLEWVSSITGGSSFIDYADSVKGRFTISRDNAKNSLFLQMNSLRAEDTAVYFCARDSMTTVTNSLAFDIWGQGTMVTVSS

SEQ ID NO: 1466 - protein, 110 aa, Artificial Sequence
  Description of Artificial Sequence: Synthetic light chain variable region amino acid sequence
QSVLTQPPSVSGAPGQRVTISCTGSSSNIGVGYDVQWYQQLPGTAPKLLIYSNNKRPSGVPDRFSGSKSGTSASLAITGLQAEDEADYYCQSYDRSLSVVFGGGTKVTVL

SEQ ID NO: 1467 - protein, 123 aa, Artificial Sequence
  Description of Artificial Sequence: Synthetic heavy chain variable region amino acid sequence
EVQLVESGGGLVKPGGSLRLSCAASGFAFSSYGINWVRQVPGKRLEWVSSISGGSSFINYADSVKGRFTISRDNAGNSVYLQMNSLRAEDTAVYFCARESYGSGSSLNWFDPWGQGTLVTVSS

SEQ ID NO: 1468 - protein, 111 aa, Artificial Sequence
  Description of Artificial Sequence: Synthetic light chain variable region amino acid sequence
QSVLTQPPSVSGAPGQRVTISCTGSGSNIGAGYDVHWYQQLPGIAPRLVIFGNRNRPSGVPDRISGSKSDTSASLAITGLQAEDEGDYYCQSYDKRLSGWVFGGGTKLTVL

SEQ ID NO: 1469 - protein, 123 aa, Artificial Sequence
  Description of Artificial Sequence: Synthetic heavy chain variable region amino acid sequence
EVQLVESGGGLVQPGGSLRLSCAAAGFTFNNYEMHWVRQAPGKGLEWVSCVTSSGTATYYADSVKGRFTVSRDNAKKSLQLQMNSLRAEDTAVYYCARELYLGEDYYYGLDVWGQGTTVTVSS

SEQ ID NO: 1470 - protein, 107 aa, Artificial Sequence
  Description of Artificial Sequence: Synthetic light chain variable region amino acid sequence
SYELTQPPSVSVSPGQTASISCSGDKLRNKHTCWYQHKSGQSPVLLIYQDNRRPSGIPDRLSGSKSGTTATLTISWTQAMDEAEYYCQAWDSNSAVIFGGGTKLTVL

SEQ ID NO: 1471 - protein, 120 aa, Artificial Sequence
  Description of Artificial Sequence: Synthetic heavy chain variable region amino acid sequence
QVQLVQSGAELKKPGASVKVSCKASGHTFATYAIHWVRQAPGQSLEWLGWINTANGDTKYSQKFRATVTIHGDTSANTVYLELSRLRSEDTAVYYCASPPLVGAINLEFWGPGTLVTVSS

SEQ ID NO: 1472 - protein, 110 aa, Artificial Sequence
  Description of Artificial Sequence: Synthetic light chain variable region amino acid sequence
QSVLTQPASVSGSVGQSITISCTGTSSDVGGYNSVSWYQHHPDKAPKLIIYEVSNRPSGVSHRFSGSKSGNTASLTISGLQAEDEADYYCSSYTTSDTLIFGGGTKVTVL

SEQ ID NO: 1473 - protein, 117 aa, Artificial Sequence
  Description of Artificial Sequence: Synthetic heavy chain variable region amino acid sequence
QVQLVQSGAEVRKPGASVKVSCKASGYTFSIYDMNWVRQAPGQGLEWMGWMNPNSGNTGYAQKFQGRVTMTGDTSISTAYMELSSLTSEDTAVYYCAVMYGDYPGYWGQGSLVTVSS

SEQ ID NO: 1474 - protein, 106 aa, Artificial Sequence
  Description of Artificial Sequence: Synthetic light chain variable region amino acid sequence
SYELTQPLSVSVALGQTARITCGGNNIGSKSVHWYQQKPGQAPVLVIYRDAKRPSGIPERFSGSNSGNTATLTISGAQAGDEADYYCQVWDSNAWIFGGRTKLTVL

SEQ ID NO: 1475 - protein, 122 aa, Artificial Sequence
  Description of Artificial Sequence: Synthetic heavy chain variable region amino acid sequence
QVQLVQSGAEVKKPGASVKVSCKASGYTFTHFGISWVRQAPGQGLEWMGWISIYNGNTNYAQKIQGRATMTTDASTSTAYMELRSLTSDDTAVYYCAREPPSTTAAATSDYWGQGTLVTVSS

SEQ ID NO: 1476 - protein, 112 aa, Artificial Sequence
  Description of Artificial Sequence: Synthetic light chain variable region amino acid sequence
DIVMTQSPLSLPVTLGQPASISCRSSQSLVYIEGNTYLSWFQQRPGQSPRRLIYKVSNRDSGVPDRFSGSGSGTDFTLKISRVEAEDVGLYYCMQGTHWPRTFGQGTKLEIK

SEQ ID NO: 1477 - protein, 134 aa, Artificial Sequence
  Description of Artificial Sequence: Synthetic heavy chain variable region amino acid sequence
QVQLQESGPGLVKPSQTLSLTCSVSEGSVISGDYYWSWIRQSPGKGLEWLGYIHYSGSTYYNPSLKSRVTISVDTSKKQFSLKLSSVTAADTAVYYCARDLGCIGGVCSAYGLEHNYYFGMDVWGQGTTVTVSS

SEQ ID NO: 1478 - protein, 108 aa, Artificial Sequence
  Description of Artificial Sequence: Synthetic light chain variable region amino acid sequence
EIVLTQSPATLSLSPGERATLSCRASQSVSSYLAWYQQKPGQAPRLLIYTASNRATGIPARFSGSGSGTDFTLTISSLEPEDFAVYYCQQRSSWPPYTFGQGTKLEIK

SEQ ID NO: 1479 - protein, 116 aa, Artificial Sequence
  Description of Artificial Sequence: Synthetic heavy chain variable region amino acid sequence
EVQLLESGGGLFHPGGSLTLSCVASGFTLSTYYMHWVRQAPGKGLVWVARINSDGGYTTYADSVKGRFTVSRDNAKNTLYLQMNSLRVEDTAVYYCAREWVEFDSWGQGTLVTVSS

SEQ ID NO: 1480 - protein, 110 aa, Artificial Sequence
  Description of Artificial Sequence: Synthetic light chain variable region amino acid sequence
NFMLTQPHSVSASPGKTVTISCTRSSGNIASNYVQWYQQRPGSSPTTVITEDNQRPSGVPDRFSGSIDSSSNSASLTISGLKTEDEADYYCQSYDSSTYVFGTGTKLTVL

SEQ ID NO: 1481 - protein, 117 aa, Artificial Sequence
  Description of Artificial Sequence: Synthetic heavy chain variable region amino acid sequence
EVQLVESGGGLVRPGGSLRVSCAASGFTFIRYDMHWVRQAPGKGLEWVSGIGTAGDTYYAASVQGRFTISRENAKNSLYLQMSNLRPGDTAVYYCAGSMAATGIDQWGQGTLVTVSS

SEQ ID NO: 1482 - protein, 112 aa, Artificial Sequence
  Description of Artificial Sequence: Synthetic light chain variable region amino acid sequence
EIVMTQSPLTLPVTPGEPASISCRSSQSLLHSNGFTYLDWFLQKPGQSPQLLIFLGSNRASGVPDRFSGSGSGTDFTLKISRVEAEDVGIYYCMQALQTPYTFGQGTKVEIK

SEQ ID NO: 1483 - protein, 123 aa, Artificial Sequence
  Description of Artificial Sequence: Synthetic heavy chain variable region amino acid sequence
EVQLLESGSGLVKPSQTLSLTCAVSGDSLNSALYSWSWIRQPPGKGLEWIGYIYYSGSTYYNSSLKSRVTISIDRSKNQFSLNLNSVTAADTAVYYCASLQTGYSSGWFFDFWGPGTLVTVSS

SEQ ID NO: 1484 - protein, 107 aa, Artificial Sequence
  Description of Artificial Sequence: Synthetic light chain variable region amino acid sequence
EIVLTQSPGTLSLSPGERATLSCRASQSVSRTYLTWYQQKPGQAPRLLIYGASNRATGIPDRFSGSGSGTDFTLTISRLEPEDFAVYYCQQYGSTPLFGQGTKVEIK

SEQ ID NO: 1485 - protein, 119 aa, Artificial Sequence
  Description of Artificial Sequence: Synthetic heavy chain variable region amino acid sequence
QVQLVESGGGLVQPGGSLRLSCAASGFPFSAYGINWVRQAPGKGLEWVSYISSTSTTIKYADSVKGRFTISRDDAKNSLYLQLRSLRPEDTAVYYCAGGVWSGYYIDFWGQGTPVTVSS

SEQ ID NO: 1486 - protein, 110 aa, Artificial Sequence
  Description of Artificial Sequence: Synthetic light chain variable region amino acid sequence
NFMLTQPQSVSESPGKTVTISCTRSSGSIGSNFVQWYQQRPGSSPTTVIYEDYQRPSGVPDRFSGSIDSSSNSASLTISGLKTEDEADYYCQSYDADMMVFGGGTKLTVL

SEQ ID NO: 1487 - protein, 126 aa, Artificial Sequence
  Description of Artificial Sequence: Synthetic heavy chain variable region amino acid sequence
QVTLKESGPALVKPTQTLTLTCTFSGFSLNTRGMCVSWVRQPPGKALEWLARIDWDDDKNYSTSLRTRLTISKDTSRNQVVLAMANMDPVDTATYYCARCARYDRSGYYVWYLDSWGQGTLVTVSS

SEQ ID NO: 1488 - protein, 108 aa, Artificial Sequence
  Description of Artificial Sequence: Synthetic light chain variable region amino acid sequence
DIQMTQSPSSLSASVGDRVTITCRASQTIASYLNWYQQKPGKAPKLLIYVASTLQSGVPSRFSGSGSGTDFTLTISSLQPEDFATYYCQQSYSLTQWTFGQGTKVEIK

SEQ ID NO: 1489 - protein, 127 aa, Artificial Sequence
  Description of Artificial Sequence: Synthetic heavy chain variable region amino acid sequence
QVQLVQSGAEVKKPGASVKVSCRASGYTFSSYDINWVRQATGQGLEWMGWMSPNSANTGYAQKFQGRVTMTRDTSINTAYMELSSLSSEDTAVYYCARFLGYCSGGSCYPGYGMDVWGQGTTVTVSS

SEQ ID NO: 1490 - protein, 113 aa, Artificial Sequence
  Description of Artificial Sequence: Synthetic light chain variable region amino acid sequence
EIVLTQSPDSLAVSLGERATINCKSSQNVLYSSNNKDYLSWYQQKPGQPPKLLIYWASTRESGVPDRFSGSGSGTDFTLTINSLQAEDVAVYYCQQYYGTPYTFGQGTKLEIK

SEQ ID NO: 1491 - protein, 130 aa, Artificial Sequence
  Description of Artificial Sequence: Synthetic heavy chain variable region amino acid sequence
QVQLQQWGAGLVKPSETLSLSCDVYGGSFSGYYWTWIRQPPGKGLEWIGEINHSGRTNYNPSLKNRVTISVDTSKKQFSLKLSSVTAADTAVYFCARAPYYDIVTDYNITTAYFYGMDVWGQGTTVTVSS

SEQ ID NO: 1492 - protein, 113 aa, Artificial Sequence
  Description of Artificial Sequence: Synthetic light chain variable region amino acid sequence
DIQMTQSPDSLAVSLGERATINCRSSQSVLYSSNNKNYLTWYQQKPGQPPKLLIYWASTRESEVPDRFSGSGSGTDFSLTISSLQAEDVAVYYCQQYYNTPLTFGGGTKVEIK

SEQ ID NO: 1493 - protein, 127 aa, Artificial Sequence
  Description of Artificial Sequence: Synthetic heavy chain variable region amino acid sequence
QVQLVQSGAEVKKPGASVKVSCTASGYSFTDYDISWVRQAPGQGLEWMGWISAYNGNTNYAQKFQDRVTMNTDTSTNTAYMELRGLRSDDTAVYYCARNCYYGSGTCYIEDYYFDYWGQGTLVTVSS

SEQ ID NO: 1494 - protein, 107 aa, Artificial Sequence
  Description of Artificial Sequence: Synthetic light chain variable region amino acid sequence
DIQMTQSPSSLSASVGDRVTITCRASQDIKNDLGWYQQKPGKPPKRLIYGASRSQSGVPSRFSGSGSGTDFTLTIYSLQPEDFATYYCLQHSDYPFTFGQGTRLEIK

SEQ ID NO: 1495 - protein, 125 aa, Artificial Sequence
  Description of Artificial Sequence: Synthetic heavy chain variable region amino acid sequence
QVQLVESGPGLVRPSGTLSLTCTVSGDSVNSYRWSWIRQSPGKGLEWIGYISYSGETNYNPSLKSRVSISVGTSRYQFFLKLSSVTAADTATYYCARDKTTIFGVSHYYFGVDVWGQGTTVTVSS

SEQ ID NO: 1496 - protein, 112 aa, Artificial Sequence
  Description of Artificial Sequence: Synthetic light chain variable region amino acid sequence
DIVMTQTPLSLPVTPGEPASISCRSSQSLLKSDGYNSLDWYLQRPGQSPQLLIYLGSNRASGVPARFSGSGSGTDFTLKISRVEAEDVGVYYCMQALQTPFTFGPGTKVEIK

SEQ ID NO: 1497 - protein, 123 aa, Artificial Sequence
  Description of Artificial Sequence: Synthetic heavy chain variable region amino acid sequence
QVQLVQSGGGVVQPGRSLRLSCAASGFTFTSYDMHWVRQAPGKGLEWVAIISHDGSKQFYADSVKGRFTISRDNSKNTLYLQMNSLRPEDTAMYYCAKDTPSWGLLAEFFRHWGQGTLVTVSS

SEQ ID NO: 1498 - protein, 113 aa, Artificial Sequence
  Description of Artificial Sequence: Synthetic light chain variable region amino acid sequence
EIVLTQSPDSLAVSLGERATINCKSSQSVLYSSNDKDYLAWYQHKPGQPPKLLIYWASTRESGVPDRFSGSGSGTDFTLTISSLQAEDVAVYYCQQYYGTPYTFGQGTKVEIK

SEQ ID NO: 1499 - protein, 118 aa, Artificial Sequence
  Description of Artificial Sequence: Synthetic heavy chain variable region amino acid sequence
QVQLVQSGAEVKKPGASVKVSCKASGYTFNFYYMHWVRQAPGQGLEWMGWINPKSGGTSYAQKFQGRVIMTGDTSISTTYMELSRLRSDDTAVYYCARADTGLELDVWGQGTTVTVSS

SEQ ID NO: 1500 - protein, 110 aa, Artificial Sequence
  Description of Artificial Sequence: Synthetic light chain variable region amino acid sequence
QSALIQPASVSGSPGQSITISCTGTSSDVGGYNYVSWYQQHPGKAPKLILYDVSKRPSGVSNRFSGSKSGNTASLTISGLQAEDESDYFCSSYTRSNTVVFGGGTKVTVL

SEQ ID NO: 1501 - protein, 125 aa, Artificial Sequence
  Description of Artificial Sequence: Synthetic heavy chain variable region amino acid sequence
EVQLVESGGGLVKPGGSLRLSCAASGFSFSSYNMNWVRQAPGKGLEWVSSISGGSSFVNYADSVKGRFTISRDNAKNSLYLQMSSLKAEDTAIYYCARDPVYCSAASCSAYFDSWGQGSLVTVSS

SEQ ID NO: 1502 - protein, 113 aa, Artificial Sequence
  Description of Artificial Sequence: Synthetic light chain variable region amino acid sequence
QSVLTQPPSVSGAPGQRVTISCTGSSSNIGAGYDVHWYQQLPGTAPKLLIYGNNNRPSGVPDRFSGFKSGSSASLAITGLQAEDEADYYCQSYDIGLSDSHVVFGGGTQLTVL

SEQ ID NO: 1503 - protein, 130 aa, Artificial Sequence
  Description of Artificial Sequence: Synthetic heavy chain variable region amino acid sequence
QVQLQQWGAGPLKSSETLSLTCEVYGGPFSGYSWSWIRQPPGKGLEWIGEINHSGSTNYNPSLKSRVSFSVDTSKNQFSLKLSSVTAADTAVYYCARGAGFCTSTSCPPGLYYYYGMDVWGHGTTVTVSS

SEQ ID NO: 1504 - protein, 106 aa, Artificial Sequence
  Description of Artificial Sequence: Synthetic light chain variable region amino acid sequence
SYELTQPLSVSVALGQTARITCGGNNIESKNVHWYQQMPGLAPVMVIYRDTNRPSGIPERFSGSNSGNTATLTISRAQAGDEADYYCQVWDSGTVIFGGGTKLTVL

SEQ ID NO: 1505 - protein, 116 aa, Artificial Sequence
  Description of Artificial Sequence: Synthetic heavy chain variable region amino acid sequence
EVQLVESGGGVVQPGRSLRLSCAASGFTFSSYGMHWVRQAPGKGLEWVAVISYDGSFIKYADSMMGRFTISRDNSKNTLYLQMSSLRPEDTATYYCAKDALIPEYWGQGTLVTVSS

SEQ ID NO: 1506 - protein, 110 aa, Artificial Sequence
  Description of Artificial Sequence: Synthetic light chain variable region amino acid sequence
QPVLTQPASVSGSPGQSITISCTGTSSDVGGYNYVSWYQKHPDKAPRVIIYEVSNRPSGVSNRFSGSKSGNTASLTISGLQAEDEADYYCCSYTSTSGVVFGGGTKLTVL

SEQ ID NO: 1507 - protein, 124 aa, Artificial Sequence
  Description of Artificial Sequence: Synthetic heavy chain variable region amino acid sequence
QVQLVQSGADVKKPGSSVKISCKASGGSFITNSLSWVRRAPGQGLEWMGGIIPVSGTTTYAQKFLGRVTFTADESTSTAYMELNSLRSEDTAVYYCARFLGTPYPNVHYGMDVWGQGTTVTVSS

SEQ ID NO: 1508 - protein, 107 aa, Artificial Sequence
  Description of Artificial Sequence: Synthetic light chain variable region amino acid sequence
DIRVTQSPSSLSASVGARVTITCRASQSISTYLNWYQEKPGKAPKLLIYAASSLQRGVPSRFSGSGSETTFTLTISSLQPEDFATYYCQQSYTAAYNFGQGTKVEIK

SEQ ID NO: 1509 - protein, 123 aa, Artificial Sequence
  Description of Artificial Sequence: Synthetic heavy chain variable region amino acid sequence
QVQLVQSGAEVKKPGSSVKVSCKASGGTFSSYAISWVRQAPGQGLEWMGRIIPVLDITNYAQKFQGRVTIMADKSTSTAYMELSSLRSEDTAIYYCARETSNFYFYYNAMDVWGQGTTVTVSS

SEQ ID NO: 1510 - protein, 111 aa, Artificial Sequence
  Description of Artificial Sequence: Synthetic light chain variable region amino acid sequence
QPVLTQPPSASGSPGQSVTISCTGTSSDVGGDNYVSWYQQHPGKAPKLLIYEVSKRPSGVPDRFSGSRSGHTASLTVSGLQAEDEADYYCSSYAGRNNLGVFGGGTKLTVL

SEQ ID NO: 1511 - protein, 127 aa, Artificial Sequence
  Description of Artificial Sequence: Synthetic heavy chain variable region amino acid sequence
QVQLVQSGPGLVKPSQTLSLTCAISGDSVSSNSAAWSWIRQSPSRGLEWLGRTYYRSKWYYDHAVSVEGRITINADTSKNHFSLQLNSVTPEDTAVYYCARDPDSGNYFHYYGMDVWGQGTTVTVSS

SEQ ID NO: 1512 - protein, 108 aa, Artificial Sequence
  Description of Artificial Sequence: Synthetic light chain variable region amino acid sequence
ETTLTQSPATLSLSPGERATLSCRTSQSVSSYLAWYQQKPGQAPRLLIYDASRRATGIPARFSGSGSGTHFTLTITSLEPEDFAVYYCQQRSKWPPYSFGQGTKVDIK

SEQ ID NO: 1513 - protein, 125 aa, Artificial Sequence
  Description of Artificial Sequence: Synthetic heavy chain variable region amino acid sequence
QVQLVQSGAEVKRPGASVKVSCKISGYTFTSHYIHWLRQAPGQGLEWMGWINPNTGDTKYEQKFQGRVTMTRDTSLSTAYMELRRLRSDDTAVYYCARDSFYAANGYYFVWFDPWGQGALVTVSS

SEQ ID NO: 1514 - protein, 107 aa, Artificial Sequence
  Description of Artificial Sequence: Synthetic light chain variable region amino acid sequence
DIQMTQSPTSLSASVGDRVTITCRASQSISSYLNWYQQKPGKAPRFLIYAASSLQSGVPSRFRGSGSGTDFTLTISSLQPEDFATYYCQQSYSSPYTFGQGTKVEIK

SEQ ID NO: 1515 - protein, 127 aa, Artificial Sequence
  Description of Artificial Sequence: Synthetic heavy chain variable region amino acid sequence
QVQLQESGPGLVKPSQTLSLTCAISGDSVSSNSAAWNWIRQSPSRGLEWLGRTYYRSKWWTDYAVSVKSRITINPDTSKNQFSLQLNSVTPEDTAVYYCARDPDSGNYFHYYGMDVWGQGTTVTVSS

SEQ ID NO: 1516 - protein, 108 aa, Artificial Sequence
  Description of Artificial Sequence: Synthetic light chain variable region amino acid sequence
ETTLTQSPATLSLSPGERATLSCRASQSASSYLAWYQQKPGQAPRLLIYDASKRATGIPARFSGSGSGTDFSLTISSLEPEDFAVYYCQLRSKWPPYTFGQGTKVEIK

SEQ ID NO: 1517 - protein, 121 aa, Artificial Sequence
  Description of Artificial Sequence: Synthetic heavy chain variable region amino acid sequence
EVQLLESGGGLVQPGGSLRLSCATSGFRFTRYWMHWVRQAPGKGLEWVARINFDGTTTNYADSVKGRFTVSRDNAKNTLYLQINSLRAEDTAVYFCARDQTFLEWLPFESWGQGTLVTVSS

SEQ ID NO: 1518 - protein, 109 aa, Artificial Sequence
  Description of Artificial Sequence: Synthetic light chain variable region amino acid sequence
QTVVTQEPSFSVSPGGTVTLTCGLTSGSVSTSYYPSWYQQTPGQAPRTLIYNTKTRFSGVPDRFSGSILGNKAALTITGAQADDESDYYCVLYMSGGMVFGGGTKLTVL

SEQ ID NO: 1519 - protein, 129 aa, Artificial Sequence
  Description of Artificial Sequence: Synthetic heavy chain variable region amino acid sequence
QVQLVQSGAEVKKPGASVRVSCKASGYPFISYYIHWVRQAPGQGLEWMGMINTNGGSTHYAQKFQGRVTMTRDTSTTTIYMELSRLKSEDTAYYFCARDNTETVLHGFWSGYGSYLDYWGQGTLVTVSS

SEQ ID NO: 1520 - protein, 108 aa, Artificial Sequence
  Description of Artificial Sequence: Synthetic light chain variable region amino acid sequence
EIVLTQSPGTLSLSPGGRATLSCRASQSVTSSYLAWYQQRPGQAPRLLIYGASSRAAGIPDRFSGSGSGTDFTLTISRLEPEDFAVYYCQQYGSAPLTFGGGTKLEIK

SEQ ID NO: 1521 - protein, 119 aa, Artificial Sequence
  Description of Artificial Sequence: Synthetic heavy chain variable region amino acid sequence
QVQLVQSGAEVKKPGESLKISCKGSGYSFISYWIGWVRQMPGKGLEWMGIIYPADSDTRYSPSFQGQVTISVDKSISTAYLQWSSLKASDTGMYYCVRYGVGGTAPRYWGQGTTVTVSS

SEQ ID NO: 1522 - protein, 111 aa, Artificial Sequence
  Description of Artificial Sequence: Synthetic light chain variable region amino acid sequence
NFMLTQPHSVSESPGKTVTISCTGSSGSIASNYVHWYQQRPGSAPTTVIYEDNQRPSGVPDRFSGSIDSSSNSASLTISGLKTEDEADYYCQSYDISNLWVFGGGTKLTVL

SEQ ID NO: 1523 - protein, 125 aa, Artificial Sequence
  Description of Artificial Sequence: Synthetic heavy chain variable region amino acid sequence
EVQLLESGPGLVRPSGTLSLTCTVSGDSISGSNWWAWVRQPPGRRLEWIGEIYYRGATDYNSSLKSRVIISVDNSKNQFSLNLRSVTAADTAIYYCARVEKFATSGYYISYFDYWGQGTLVTVSS

SEQ ID NO: 1524 - protein, 107 aa, Artificial Sequence
  Description of Artificial Sequence: Synthetic light chain variable region amino acid sequence
DIRVTQSPSSLSASVGDRVTITCRASQSISTYLNWYQHNPGKAPKLLIYAASSLQSGVPSRFSGSGSGTHFTLTISSLQPADFSTYYCQQSYSSPWTFGQGTKVEIK

SEQ ID NO: 1525 - protein, 123 aa, Artificial Sequence
  Description of Artificial Sequence: Synthetic heavy chain variable region amino acid sequence
QVQLVESGPGLVKPSETLSLACSVSGVSISTYYWTWIRQPPGKGLEWIGYISYSGSTNYNPSLKSRVTISADTSKNQFSLRLNSVTAADTAVYYCARTYYDFWSTYYGEFDHWGHGTLVTVSS

SEQ ID NO: 1526 - protein, 108 aa, Artificial Sequence
  Description of Artificial Sequence: Synthetic light chain variable region amino acid sequence
SYELTQPLSVSVALGQTARITCGGNNIESKNVHWYQQKPGQAPVVVMYRDTNRPSGIPERFSGSNSGNTATLTISRAQAGDEADYYCQVWDSGTAGVVFGGGTKVTVL

SEQ ID NO: 1527 - protein, 133 aa, Artificial Sequence
  Description of Artificial Sequence: Synthetic heavy chain variable region amino acid sequence
QVQLVQSGAEVKKPGSSVKVSCKASGGTFGSYTINWVRQAPGQGLEWMGGIIPIFGATNYAQNFQGRVSITADKSTATAYMDLISLRSEDTAVYYCARLGRSSPLNSCTTTSCYFWGRGMDVWGQGTTVTVSS

SEQ ID NO: 1528 - protein, 111 aa, Artificial Sequence
  Description of Artificial Sequence: Synthetic light chain variable region amino acid sequence
QSVLIQPASVSGSPGQSITISCTGTISDVGIYNYVSWYQQHPGKAPKLIISDVSDRPSGVSNRFSGSKSGITASLTITGLQAEDEADYYCSSYSSSSTLYVFGTGTKLTVL

SEQ ID NO: 1529 - protein, 129 aa, Artificial Sequence
  Description of Artificial Sequence: Synthetic heavy chain variable region amino acid sequence
EVQLVESGPGLVKPSEALSLTCTVSGASISSYYWTWIRQSPRKGLEWIGYIYHTGRTNYNPSLKRRVTMSVDWSKNQFSLTLSSVTAADTAVYYCARLKVVPAALESAILEHHFGLDVWGQGTTVTVSS

SEQ ID NO: 1530 - protein, 107 aa, Artificial Sequence
  Description of Artificial Sequence: Synthetic light chain variable region amino acid sequence
DIVMTQTPSTLSASIGDRVTLTCRASQSINRWLAWYQQKPGKAPKLLIYKASTLESGVPSRFSGSGSGTEFTLTISGLQPDDFATYYCQQYNNFPYTFGPGTKVDIK

SEQ ID NO: 1531 - protein, 119 aa, Artificial Sequence
  Description of Artificial Sequence: Synthetic heavy chain variable region amino acid sequence
EVQLLESGPGLVRPSETLSLTCTVSGGSLDSGPHYWNWIRQPPGKGLEWIGYIYYSVSTNYNPSLKSRVTISMDTSKNQFSLNLTSVTAADTAVYYCASFQLIYGPQIWGQGKKVTVSS

SEQ ID NO: 1532 - protein, 107 aa, Artificial Sequence
  Description of Artificial Sequence: Synthetic light chain variable region amino acid sequence
DIVLTQSPSSVSASVGDRVTITCRASQAISSWLIWSQHKPGKAPKVLIYAASSLQSGVPSRFSGSGSGTDFTLTISSLQPEDFATYYCQQANNFPLTFGGGTKVEIK

SEQ ID NO: 1533 - protein, 118 aa, Artificial Sequence
  Description of Artificial Sequence: Synthetic heavy chain variable region amino acid sequence
QVQLQQWGAGLLKPSETLSLTCSVYGGSFSGYYWSWIRQPPGKGLEWIGEINHSGSTNYNPSLKSRITISVDTSKNQFSLKLNSVTAADTAVYYCARGDYAFVTFDYWGQGTLVTVSS

SEQ ID NO: 1534 - protein, 110 aa, Artificial Sequence
  Description of Artificial Sequence: Synthetic light chain variable region amino acid sequence
QSVLTQPASVSGSPGQSITISCTGTSSDVGGYNYVSWYQQHPGKAPKLMIYEVSNRPSGVSNRFSGSKSGNTASLTISGLQAEDEADYYCSSYTSSSTPVFGGGTKLTVL

SEQ ID NO: 1535 - protein, 130 aa, Artificial Sequence
  Description of Artificial Sequence: Synthetic heavy chain variable region amino acid sequence
QVQLVESGGGLVKPGGSLRLSCAASGFTFSTYTMNWVRQAPGKGLEWVSSISGSSAYIYYADSVKGRFTISRDNAKNSLFLQMNSLRAEDTAVYYCARLQGLVLPAVMPSYYYYSGMDVWGQGTTVTVSS

SEQ ID NO: 1536 - protein, 112 aa, Artificial Sequence
  Description of Artificial Sequence: Synthetic light chain variable region amino acid sequence
EIVMTQSPLSLPVTPGEPASISCRSSQSLLHSNGYNYLDWYLQKPGQSPQLLIYLASNRASGVPDRFSGSGSGTDFTLKISRVEAEDVGVYYCMQALQTPQAFGQGTKVEIK

SEQ ID NO: 1537 - protein, 118 aa, Artificial Sequence
  Description of Artificial Sequence: Synthetic heavy chain variable region amino acid sequence
EVQLVESGPGLVKPSETLSLTCTVSGGSINSDYWNWIRQTPGKGLEWIGYIFYSGNTNYNPSLKSRVTISIDTSKKKFSLQVTSVTAADTAVYYCARMGTLKFDFDNWGQGTLVTVSS

SEQ ID NO: 1538 - protein, 111 aa, Artificial Sequence
  Description of Artificial Sequence: Synthetic light chain variable region amino acid sequence
QSALTQPRSVSGSPGQSVTIPCTGTSSDVGAYKYVSWYQQHPGKAPKLIIYDVTKRPSGVPNRFSGSKSGNTASLTISGLQAEDEADYYCCSYAGTHTYWVFGGGTKVTVL

SEQ ID NO: 1539 - protein, 121 aa, Artificial Sequence
  Description of Artificial Sequence: Synthetic heavy chain variable region amino acid sequence
EVQLVESGGGVVQPGRSLRLSCAASGFNFHNYAFHWVRQAPGKGLDWVAVTSYDGSSAFYADSVKGRFTISRDNSKKILYLQMTSLRAEDTALYYCARGSSSWSGDYFDYWGQGILVTVSS

SEQ ID NO: 1540 - protein, 108 aa, Artificial Sequence
  Description of Artificial Sequence: Synthetic light chain variable region amino acid sequence
DIVMTQSPVTLSVSPGERATLSCRASQSVGSNLAWYQQKHGQTPRLLIYDASTRATSIPARFSGSGSGTEFTLTISSLQSEDFAVYYCQQYNKWPSYTFGQGTKVEIK

SEQ ID NO: 1541 - protein, 129 aa, Artificial Sequence
  Description of Artificial Sequence: Synthetic heavy chain variable region amino acid sequence
EVQLLESGGGLVQPGGSLRLSCAASGFTFSSYSMNWVRQAPGKGLEWVSYMSSDRSAIYYSDSVKDRFTISRDNAKNSLYLQMHSLRAEDTAVYYCARRYCSSTSCYRGLGYYYGMDVWGQGTTVTVSS

SEQ ID NO: 1542 - protein, 108 aa, Artificial Sequence
  Description of Artificial Sequence: Synthetic light chain variable region amino acid sequence
SYELTQPPSVSVAPGQTARITCGGSNIGNKDVHWYQQKPGQAPVLVVYDDSDRPSGIPERFAGSNSGNTATLTISRVEAGDEADYYCQVWHSAGDHVVFGGGTKLTVL

SEQ ID NO: 1543 - protein, 128 aa, Artificial Sequence
  Description of Artificial Sequence: Synthetic heavy chain variable region amino acid sequence
QVQLVQSGAEVRKPGSSVKVSCKASGGTFNSFVISWVRQAPGQGLEWMGRIIPILATVDYAQKFQGRVTITADKSTTTAYMELSGLTSEDTAVYYCARDPPRWDTTMADYYYQGMDVWGQGTTVTVSS

SEQ ID NO: 1544 - protein, 107 aa, Artificial Sequence
  Description of Artificial Sequence: Synthetic light chain variable region amino acid sequence
DIRVTQSPASLSAFVGDRVTISCRASQSIGSFLNWYQQKPGKAPKLLIYAASSLQSGVPSRFSGSGSGTDFTLAISSLQPEDFATYYCQQSYRSTPTFGGGTKVEIK

SEQ ID NO: 1545 - protein, 124 aa, Artificial Sequence
  Description of Artificial Sequence: Synthetic heavy chain variable region amino acid sequence
QVQLVQSGAEVKKPGESLKISCKGSGYSFTKYWIGWVRQLPGKGLEWMGIIYPGDSETIYSPSFQGQVTISADKSVSTAYLQWSSLKASDTAMYYCARQTFVFWGESHDAFDIWGQGTTVTVSS

SEQ ID NO: 1546 - protein, 110 aa, Artificial Sequence
  Description of Artificial Sequence: Synthetic light chain variable region amino acid sequence
QPVLTQPPSASGSPGQSVTISCTGTSSDVGAHNYVSWYQQHPGKAPKLMIYEVSKRPSGVPDRFSGSKSGNTASLTVSGLQAEDEADYYCSSYAGSNNWVFGGGTKLTVL

SEQ ID NO: 1547 - protein, 121 aa, Artificial Sequence
  Description of Artificial Sequence: Synthetic heavy chain variable region amino acid sequence
EVQLVESGGGLVQPGRSLRLSCTTSGFTFGDYAVTWVRQAPGKGLEWIGIMKSKTYRGTTDYAASLRGRFSISRDDSKSIAYLQMTSLKSEDTGVYYCVRGHDYGDPFDYWGQGTLVTVSS

SEQ ID NO: 1548 - protein, 110 aa, Artificial Sequence
  Description of Artificial Sequence: Synthetic light chain variable region amino acid sequence
QSVLTQPASVSGSPGQSITISCTGGSSDVGYYNYVSWYQQHPGKAPKLLIYDVNNRPSGVSDRFSGSKSGNTASLTISGLQPEDEADYYCSSYTRSRTWVFGGGTKLTVL

SEQ ID NO: 1549 - protein, 124 aa, Artificial Sequence
  Description of Artificial Sequence: Synthetic heavy chain variable region amino acid sequence
QVQLVQSGGGLVEPGGSLRLSCAASGFTFSNTWMNWVRQAPGKGLTWVGRIKRKTDFGTSDYAAPVKGRFTISRDDSKNMVFLQMNSLKIEDTGVYYCTTHPRPYLDTTAVVYWGQGTLVTVSS

SEQ ID NO: 1550 - protein, 111 aa, Artificial Sequence
  Description of Artificial Sequence: Synthetic light chain variable region amino acid sequence
QPVLTQPHSVSESPGKTVTISCIGSSGSITSNYVQWFQQRPGSAPTTVIYEDDQRPSGVPDRFSGSIDSSSNSASLTISGLKTEDEADYYCQSYHHTNPWVFGGGTKLTVL

SEQ ID NO: 1551 - protein, 126 aa, Artificial Sequence
  Description of Artificial Sequence: Synthetic heavy chain variable region amino acid sequence
QVQLVQSGAEVKKPGASVKVSCKASGYTFTSDDINWVRQATGQGLEWMGWMNPNSGDTGYAQKFQGRVTMTRDTSISTAYMELSSLRSEDTAVYYCARVRIQCSGGRCSYWFFDLWGRGTLVTVSS

SEQ ID NO: 1552 - protein, 110 aa, Artificial Sequence
  Description of Artificial Sequence: Synthetic light chain variable region amino acid sequence
QSALTQPASVSGSPGQSITISCIGTSSDVGNYNLVSWYQHHPGKAPKVMIYEVNERPSGVSNRFSGSKSGNTASLTISGLQAEDEADYYCCSYAGRSTWVFGGGTKLTVL

SEQ ID NO: 1553 - protein, 124 aa, Artificial Sequence
  Description of Artificial Sequence: Synthetic heavy chain variable region amino acid sequence
QVQLVESGGGVVQPGRSLRLSCAASGFTFSNHAMHWVRQAPGKGLEWLSFISYDGGVNFYRDSVKGRFTISRDNSKNTLYLQMSSLRPEDTAVYYCARDRVGRVVGASYYLDYWGRGALVTVSS

SEQ ID NO: 1554 - protein, 109 aa, Artificial Sequence
  Description of Artificial Sequence: Synthetic light chain variable region amino acid sequence
QSVVTQPPSVSVAPGQTASITCGGKHIGSKSVHWYQQKPGQSPVLVVHDDSDRPSGILERFSGSNSGNTATLTINRVEAGDEADYYCQVWDNASDHPYVFGPGTKVTVL

SEQ ID NO: 1555 - protein, 125 aa, Artificial Sequence
  Description of Artificial Sequence: Synthetic heavy chain variable region amino acid sequence
EVQLLESGGGLVKPGGSLRLSCAASGFIFSDYAMNWVRQTPGKGLEWVSSISDSSAYKYYTGSVSGRFTISRDNAKNSLYLQMNDLRPEDTAVFYCARGQWRCSGASCYSPFDSWGQGTLVTVSS

SEQ ID NO: 1556 - protein, 109 aa, Artificial Sequence
  Description of Artificial Sequence: Synthetic light chain variable region amino acid sequence
SYELTQPPSVSVAPGQTARIPCGGNNIESKNVHWYQQKPGQAPVLVVYDDSDRPSGIPERFSGSNSGSTATLTISRVEAGDEADYYCHVWHRSGDLREVFGSGTKVTVL

SEQ ID NO: 1557 - protein, 121 aa, Artificial Sequence
  Description of Artificial Sequence: Synthetic heavy chain variable region amino acid sequence
EVQLVESGGVVVQPGGSLRLSCAASGFSFDDYTMYWVRQAPEKGLEWISLISWNGGVTYYPDSVKGRFTVSRDNNKNSLYLQMDSLRPEDSAFYYCAKESLESSGHFLDYWGQGTLVTVSS

SEQ ID NO: 1558 - protein, 111 aa, Artificial Sequence
  Description of Artificial Sequence: Synthetic light chain variable region amino acid sequence
QPVLTQSRSVSGSPGQSVTISCIGTNSDVGGYHYVSWFQHHPGKAPKLMIYDVSRRPSGVPARFSGSKSGNTASLSISGLRAEDEADYYCCSFAGTYTPYVFGTGTKLTVL

SEQ ID NO: 1559 - protein, 121 aa, Artificial Sequence
  Description of Artificial Sequence: Synthetic heavy chain variable region amino acid sequence
QVQLVQSGAEVKKPGSSVKVSCKASGGIFSDFAISWVRQAPGQGLEWMGGIITIIGTPEYAQKFQGRVRITADESTTTVFMELSRLTSEDTAVYYCARDSRYGSGWYWDHWGQGTLVTVSS

SEQ ID NO: 1560 - protein, 113 aa, Artificial Sequence
  Description of Artificial Sequence: Synthetic light chain variable region amino acid sequence
DIVMTQTPDSLAVSLGERATINCKSSQSVLYISNNKNYLAWYQQKPGQPPKLLIYWASTRDSGVPDRFSGSGSGTDFTLSISSLQPEDVAVYYCQQYYDTPRTFGQGTKLEIK

SEQ ID NO: 1561 - protein, 124 aa, Artificial Sequence
  Description of Artificial Sequence: Synthetic heavy chain variable region amino acid sequence
QVQLVQSGAEVKKPGSSVKVSCKASGGPFSSDAMSWVRQAPGQGLEWMGGIIPILGSATYAQKFKGRVTIAADESTSTSYMELSGLKYEDTAVYYCARPFYDPLTGYFDTFNVWGQGTTVTVSS

SEQ ID NO: 1562 - protein, 111 aa, Artificial Sequence
  Description of Artificial Sequence: Synthetic light chain variable region amino acid sequence
QSVLTQPRSVPGSPGQSVTISCTGTSGDVGGYNYVSWYQQHPGKAPKLVIYDVTKRPSGVPDRFSGSKSGNRASLTISGLQAEDEADYYCCSYAGSQTGYVFGTGTKVTVL

SEQ ID NO: 1563 - protein, 123 aa, Artificial Sequence
  Description of Artificial Sequence: Synthetic heavy chain variable region amino acid sequence
EVQLLESGGGLVQPGGSLRLSCAASGFTFSDFPLSWVRQAPGKGLVWVSAISSSGGDTYYADSVKGRFTISRDSSKNALYLQMNSLRAEDTAVYYCAKGQELLRPYYYGMDVWGQGTTVTVSS

SEQ ID NO: 1564 - protein, 110 aa, Artificial Sequence
  Description of Artificial Sequence: Synthetic light chain variable region amino acid sequence
QSALIQPASVSGSPGQSITISCTGTSSDVGGYNFVSWYQQHPGKAPKLMIFEVSNRPSGVSHRFSGSKSGNTASLTISGLQAEDEADYYCSSCTSRFTYVFGTGTKLTVL

SEQ ID NO: 1565 - protein, 124 aa, Artificial Sequence
  Description of Artificial Sequence: Synthetic heavy chain variable region amino acid sequence
EVQLLESGPGLLKTSETLSLTCTVSDGSISGYYWTWIRQPPGKGLECIGYISYSGSTNYSPSLKSRVTISVDTSKNQFSLKLSSVTAADTAVYYCAKIGGYCNPTKCYGWFDPWGQGTLVTVSS

SEQ ID NO: 1566 - protein, 111 aa, Artificial Sequence
  Description of Artificial Sequence: Synthetic light chain variable region amino acid sequence
QPVLTQPPSVSGAPGQRVTISCTGSSSNIGAGYDVHWYQQLPGTAPKLLIFGNTNRPSGVPDRFSGSKSGTSASLAITGLQAEDEAAYYCQSYDSSLFYVVLGGGTKLTVL

SEQ ID NO: 1567 - protein, 132 aa, Artificial Sequence
  Description of Artificial Sequence: Synthetic heavy chain variable region amino acid sequence
QVQLQQSGAGLLKPSETLSLTYVVYGGSFSGYYWSWIRQPPGKGLEWVGDINHSTTTNYNPSLESRITISIDTSKNQFSLNLSSVTAADSAVYYCARGPKECTSSSCDRFGVDYFYYGMDVWGRGTTVTVSS

SEQ ID NO: 1568 - protein, 111 aa, Artificial Sequence
  Description of Artificial Sequence: Synthetic light chain variable region amino acid sequence
QSVLTQPPSVSGAPGQRVTISCTGSSANIGAGYDVHWYQQFPGTAPKLLIFGNSNRPSGVPDRFSGSKSGTSASLAITGLQAGDEADYYCQSYDGTLGGWVFGGGTQLTVL

SEQ ID NO: 1569 - protein, 124 aa, Artificial Sequence
  Description of Artificial Sequence: Synthetic heavy chain variable region amino acid sequence
QVTLKESGPTLVKPTQTLRLTCTFSGFSLNVISGVGVGWIRQPPGKALEWLALIYWDDDKRYSPSLKSRLTIAKDTSKNQVVLTMTNMDPVDTATYYCAHKGGSIEAAVGFDYWGQGTLVTVSS

SEQ ID NO: 1570 - protein, 112 aa, Artificial Sequence
  Description of Artificial Sequence: Synthetic light chain variable region amino acid sequence
QSVLTQPPSVSGAPGQRVIISCTGSSSNIGAGFAVHWYQQLPGTAPKLLIYANTNRPSGVPDRFSGSKSGTSASLAITGLQAEDEADYYCQSYDTSLSGFYVFGTGTKLTVL

SEQ ID NO: 1571 - protein, 123 aa, Artificial Sequence
  Description of Artificial Sequence: Synthetic heavy chain variable region amino acid sequence
QVQLVQSGAEVRKPGASVKVSCKASGYGFRSYDLTWVRQAPGKGLEWVGWISAYSGGTNYAQTLQGRVTMTTDTSTSTAYMELRSLGPDDTAVYYCARAGLYGSGSPDGFDSWGQGTLVTVSS

SEQ ID NO: 1572 - protein, 107 aa, Artificial Sequence
  Description of Artificial Sequence: Synthetic light chain variable region amino acid sequence
SYELTQPPSVSVSPGQTASITCSGDKLGDKYASWYQQRPGQSPVLVISQDTKRPSGIPERFSGSTSGNTAILTISGTQAMDEADYYCLAWDSSTAWVFGGGTKLTVL

SEQ ID NO: 1573 - protein, 124 aa, Artificial Sequence
  Description of Artificial Sequence: Synthetic heavy chain variable region amino acid sequence
QVQLVESGGGLVQPGGSLRLSCAASGFTFSDYAMSWVRQAPGKGLVWVSSISGSGKFTYYEDSLRGRVTISRDNSKNTVYLHMNSLRTEDTALYYCARLRIPVINEVDGAMDVWGQGTTVTVSS

SEQ ID NO: 1574 - protein, 108 aa, Artificial Sequence
  Description of Artificial Sequence: Synthetic light chain variable region amino acid sequence
SYELTQLPSVSVSPGQTARITCSGDALPKKFAYWYQQKSGQAPVLVIYEDTGRPSGIPERFSGSTSGTTATLTINGAQVEDEGDYYCYSADSSDNQGVFGGGTKVTVL

SEQ ID NO: 1575 - protein, 125 aa, Artificial Sequence
  Description of Artificial Sequence: Synthetic heavy chain variable region amino acid sequence
EVQLLESGPRLVKPSETLSLTCIVSGGFISYDYWSWIRQPAGKGLEWIGRIYAGGIPKYNPSLKSRVTMSLDMSNNQFSLRLKSVTAADSAVYYCARAEPCSGDCFLGENPFDSWGQGTLVTVSS

SEQ ID NO: 1576 - protein, 110 aa, Artificial Sequence
  Description of Artificial Sequence: Synthetic light chain variable region amino acid sequence
QSVLTQPPSASGTPGQRVTISCSGSSSSIGSNYVYWYQQLPGTAPKLLIHKDNERPSGVPDRFSGSKSGTSASLAISGLRSEDEGDYSCAAWDDSLSGWVFGGGTKLTVL

SEQ ID NO: 1577 - protein, 119 aa, Artificial Sequence
  Description of Artificial Sequence: Synthetic heavy chain variable region amino acid sequence
QVQLVQSGGGLVQPGGSLRLACAASGFTLSGYAMNWVRQAPGKGLEWVSSISGSGGSTYYADSVKGRFTTSRDNSKNTVFLHMNSLRAEDTAIYYCATVPWETGPFDHWGQGTLVTVSS

SEQ ID NO: 1578 - protein, 111 aa, Artificial Sequence
  Description of Artificial Sequence: Synthetic light chain variable region amino acid sequence
QSVLTQPPSVSGAPGQRVTISCTGSSSNIGAGYAVHWYQQLPGTAPKLLIHGTTNRPSGVPDRFSGSKSGTSASLAITGLQAEDEADYYCQSYDSRLSGYVFGTGTKLTVL

SEQ ID NO: 1579 - protein, 125 aa, Artificial Sequence
  Description of Artificial Sequence: Synthetic heavy chain variable region amino acid sequence
EVQLVESGGGLVKPGGSLRLSCAASGFTFSSYSMNWVRQAPGKGLEWVSSISSSSSYINYADSVKGRFTISRDNAKNSLYLQMNSLRAEDTALYYCARDLGYCSDTSCTPGIGYWGQGTLVTVSS

SEQ ID NO: 1580 - protein, 111 aa, Artificial Sequence
  Description of Artificial Sequence: Synthetic light chain variable region amino acid sequence
QPVLTQPPSVSGAPGQRVTISCTGSSSNIGAGYDVHWYQQLPGTAPKLLIYGNSNRPSGVPDRFSGSKSGTSASLAITGLQAEDEADYYCQSYDSGLSPWVFGGGTKLTVL

SEQ ID NO: 1581 - protein, 127 aa, Artificial Sequence
  Description of Artificial Sequence: Synthetic heavy chain variable region amino acid sequence
QVQLVESGPGLVKPSETLSLTCNVSGGSIITSGSYWGWIRQPPGKGLTWIGSISYSGTTYYNPSLRSRLTISLDTSRNHFSLQLTSVSAADTAVYYCARAFYEVWTGSEIPGDFDRWGQGTLVTVSS

SEQ ID NO: 1582 - protein, 108 aa, Artificial Sequence
  Description of Artificial Sequence: Synthetic light chain variable region amino acid sequence
EIVLTQSPGTLSLSPGERATLSCRASQSVSSSYLAWYQQKPGQAPRLLIYGASSRAIDIPDRFSGSGSGTDFTLTISRLEPEDFAVYYCQQFRRSPWTFGQGTKVDIK

SEQ ID NO: 1583 - protein, 127 aa, Artificial Sequence
  Description of Artificial Sequence: Synthetic heavy chain variable region amino acid sequence
EVQLLESGGGVVRPGGSLRLSCAASGFSFDDYGMTWVRQAPGKGLEWVSGINWNGISTDYADSVKGRFTISRDNAKNSVYLQMNSLRAEDTALYYCARIGGVVVIASTAYYYGMDVWGQGTTVTVSS

SEQ ID NO: 1584 - protein, 107 aa, Artificial Sequence
  Description of Artificial Sequence: Synthetic light chain variable region amino acid sequence
DIQLTQSPSSLSAYVGDRVTITCRASQSIRNHLNWYQQKPGKAPQLLIYTASSLQDGVPSRFSGSGSGTDFTLAISSLQPEDFATYYCQQSHSMPPTFGQGTRLEIK

SEQ ID NO: 1585 - protein, 123 aa, Artificial Sequence
  Description of Artificial Sequence: Synthetic heavy chain variable region amino acid sequence
EVQLVESGGGLVQPGRSLRLSCAASGFTFDDFAMDWVRQVPGKGLEWVSGISWNGVSKDYAGSVKGRFTISRDNAKNSLYLQMNSLRAEDTALYFCAKARRDVYNWGDAFDIWGQGTMVTVSS

SEQ ID NO: 1586 - protein, 108 aa, Artificial Sequence
  Description of Artificial Sequence: Synthetic light chain variable region amino acid sequence
DIRLTQSPGTLSLSPGERATLSCRASQPLNSNYLAWYRQKPGQAPRLLIFDASSRATGVPDRISGSGSGTDFTLTVSRLEPEDIAVYYCQQYASSPWTFGLGTKVEIK

SEQ ID NO: 1587 - protein, 124 aa, Artificial Sequence
  Description of Artificial Sequence: Synthetic heavy chain variable region amino acid sequence
QVQLVQSGAEVKKPGSSVKVSCKASGGTFNNFPISWVRQAPGQGLEWMGGIIPMFGRANYAQKFQGRVTITADESTTTVYMALRSLRSEDTAVYYCARPDYDVLTGFEGAFDIWGQGTMVTVSS

SEQ ID NO: 1588 - protein, 110 aa, Artificial Sequence
  Description of Artificial Sequence: Synthetic light chain variable region amino acid sequence
QSALTQPASVSGSPGQLITISCTGTSRDVGGYNYVSWYQQHPGKAPKLMIYDVTNRPSGVSNRFSGSKSGNTASLTISGLQSEDEADYYCSSYTSTTTWVFGGGTKLTVL

SEQ ID NO: 1589 - protein, 128 aa, Artificial Sequence
  Description of Artificial Sequence: Synthetic heavy chain variable region amino acid sequence
QVQLVQSGAEVKKPGESLRISCKGSGDTFSNYWIGWVRQMPGKGLEWMGIIYPGDSDTRYSPSFQGQVTFSADKSISTAYLQWSSLKASDTAMYYCVRQVGGVVVTDTDNYYYGMDVWGQGTTVTVSS

SEQ ID NO: 1590 - protein, 107 aa, Artificial Sequence
  Description of Artificial Sequence: Synthetic light chain variable region amino acid sequence
DIRLTQSPSSLSASVGDRVTITCRASQSIRSYLNWYQQKPGKAPKLLIYSASSLQSGVPSRFSGSGSGTDFTLTISSLQPEDFATYYCQQSHSTPLTFGPGTKVDIK

SEQ ID NO: 1591 - protein, 125 aa, Artificial Sequence
  Description of Artificial Sequence: Synthetic heavy chain variable region amino acid sequence
EVQLVESGGGLVQPGRSLRLSCTGSGFTFGDYAISWFRQAPGKGLEWVGFIRSKPYGGTTEYAASVKGTFTISRDDSKSIAYLQMNSLKTGDTAVYFCTRGIWGITMIVPWSDPWGQGTLVTVSS

SEQ ID NO: 1592 - protein, 112 aa, Artificial Sequence
  Description of Artificial Sequence: Synthetic light chain variable region amino acid sequence
DIVMTQTPLSLPVTPGEPASISCRSSQSLLHSNGFNYLAWYLQKPGQSPQLLIYLNSNRASGVPDRFSGSGSGTDFTLKISRVEAEDVGVYYCMQALQTPLTFGPGTKLEIK

SEQ ID NO: 1593 - protein, 124 aa, Artificial Sequence
  Description of Artificial Sequence: Synthetic heavy chain variable region amino acid sequence
QVQLVQSGAEMKKPGSSVKVSCKASGRTFKYFALNWMRRAPGHGLEWIGGDIPISGSTNYAQKFQGRVTITADESASTAYMEVSRLRSDDTAVYYCASLHYDVSTGFSDAFDIWGQGTMVTVSS

SEQ ID NO: 1594 - protein, 110 aa, Artificial Sequence
  Description of Artificial Sequence: Synthetic light chain variable region amino acid sequence
QSVLTQPASVSGSPGQSITISCTGTSSDVGAYNYVSWYQHHPGKAPKLMIFDVSNRPSGVSNRFSGSKSGNTASLTISGLQAEDEADYYCSSYRSTFSYVFGTGTKVTVL

SEQ ID NO: 1595 - protein, 121 aa, Artificial Sequence
  Description of Artificial Sequence: Synthetic heavy chain variable region amino acid sequence
QVQLVQSGAEVKKPGASVKVSCEASGYTFTDYYMHWVRQAPGQGLEWMGWINPNSGVTKIAQNFQGRVTMTRDTSITTAYMDLSRLRSDDTAVYYCARVVDGDYDNWFDFWGQGTLVTVSS

SEQ ID NO: 1596 - protein, 110 aa, Artificial Sequence
  Description of Artificial Sequence: Synthetic light chain variable region amino acid sequence
SYVLTQPPSASGTPGQRVTISCSGSTSNIGTNTVNWYQQPPGMAPKLLIYANNQRPSGVPDRFSGSKSGTSASLAISGLQSEDEADYHCAVWDDSLPGWVFGGGTKLTVL

SEQ ID NO: 1597 - protein, 131 aa, Artificial Sequence
  Description of Artificial Sequence: Synthetic heavy chain variable region amino acid sequence
EVQLLESGGGLVQPGGSLRLSCAASGFTFTSYWMSWVRQAPGQGLEWVATIKQDGSEKYYVDSVKGRFTISRDNAKNSLYLQMNSLGAEDTAVYYCARDMYCSTTTCYFFETYYYNGMDVWGQGTTVTVSS

SEQ ID NO: 1598 - protein, 107 aa, Artificial Sequence
  Description of Artificial Sequence: Synthetic light chain variable region amino acid sequence
DIRLTQSPSSVSASVGDRVTITCRASQVTSTWLAWYQQNPGKAPKLLIYAASRLQSGVPSRFSGSGSGTEFTLTISSLQPEDFATYYCQQANSFPLTFGGGTKVEIK

SEQ ID NO: 1599 - protein, 124 aa, Artificial Sequence
  Description of Artificial Sequence: Synthetic heavy chain variable region amino acid sequence
EVQLVESGGGVVQPGRSLRLSCAASGFTFSSYAMHWVRQAPGKGLEWVAVISFDGSSDYYADSVKGRFTISRDSSKNTLYLRMNSLRAEDTAVYYCARRAVEYSIYNNDAFDVWGQGTTVTVSS

SEQ ID NO: 1600 - protein, 106 aa, Artificial Sequence
  Description of Artificial Sequence: Synthetic light chain variable region amino acid sequence
SYELTQPPSVSVSPGQTASITCSGDKLGNKFTFWYQQKSGQSPVLVIYQETKRPSGIPERFSGSNSGNTATLTISGTQSMDEADYYCQAWDSSTAFFGGGTKLTVL

SEQ ID NO: 1601 - protein, 124 aa, Artificial Sequence
  Description of Artificial Sequence: Synthetic heavy chain variable region amino acid sequence
EVQLVQSGAEVRRPGSSVKVSCKASGGTLDTDSISWVRQVPGQGLVWVGGVIPILGSVVYARKFQGRVTITADGSTSTAYMELRSLRSEDTAMYYCASQFYDFRRGYFDAFDIWGQGTTVTVSS

SEQ ID NO: 1602 - protein, 110 aa, Artificial Sequence
  Description of Artificial Sequence: Synthetic light chain variable region amino acid sequence
ETTLTQSPGILSLSPGERATLSCRATQTVISNYINWYQQKPGQAPRLLIYGASSRATGIPDRFSGSGSGTDFTLTISRLEPEDFAVYYCQRYDSSPPGFTFGPGTKVDIK

SEQ ID NO: 1603 - protein, 115 aa, Artificial Sequence
  Description of Artificial Sequence: Synthetic heavy chain variable region amino acid sequence
QVQLVESGAEVKKPGASVKVSCRASGYTFSAYDINWVRQAPGQGLEWVGWMNPNSGNTGYALRFQGRVTMTRDTSINTAYMELSSLRSDDTAVYYCAAQLWYPNWGQGTLVTVSS

SEQ ID NO: 1604 - protein, 106 aa, Artificial Sequence
  Description of Artificial Sequence: Synthetic light chain variable region amino acid sequence
SYELTQPPSVSVGLGQTASITCGGNNIGSKSVHWYQQKPGQAPTLVIYRDTNRPSGIPERFSGSNSENTATLTISRAQAGDEADFYCQVSDNYSWVFGGGTKLTVL

SEQ ID NO: 1605 - protein, 126 aa, Artificial Sequence
  Description of Artificial Sequence: Synthetic heavy chain variable region amino acid sequence
EVQLLESGGDLVQPGGSLRLSCAASGFTFFSYALNWVRRTPGKGLEWVSGISGSGGSTYYADSVKGRFTISRDNSKSTLYLQMNSLKVDDTAVYFCAKDFQHDYGDPYRSYYFDHWGQGTLVTVSS

SEQ ID NO: 1606 - protein, 108 aa, Artificial Sequence
  Description of Artificial Sequence: Synthetic light chain variable region amino acid sequence
DIQLTQSPSSLAASVGDRVTITCQASRDIRKSLNWYQVKPGKAPKLLISDASYLETGVPPRFSGSGFGTHFTFTISSLQPEDIATYYCQQYDNLPPPTFGGGTKVDIK

SEQ ID NO: 1607 - protein, 124 aa, Artificial Sequence
  Description of Artificial Sequence: Synthetic heavy chain variable region amino acid sequence
QVQLVQSGAEVKKPGESLKISCKGSGYSFTSSWIGWVRQMPGKGLEWMGIIYPGDSDTRYSPSIQGRVTISADKSITTAYLQWSSLKASDTATYYCAKFGGYADAYFYHGMDVWGQGTTVTVSS

SEQ ID NO: 1608 - protein, 110 aa, Artificial Sequence
  Description of Artificial Sequence: Synthetic light chain variable region amino acid sequence
SYVLTQPPSASGTPGQRVTISCSGSSSNVGSNTVNWYQQLPGTAPKLLIHFNNQRPSGVPDRFSGSKSGTSASLAISGLQSEDEADYYCAAWDDSLNTWVFGGGTKVTVL

SEQ ID NO: 1609 - protein, 124 aa, Artificial Sequence
  Description of Artificial Sequence: Synthetic heavy chain variable region amino acid sequence
QVQLVESGGGVVQPGRSLRLSCAASGFTFSSYAMHWVRQAPGKGLEWLAVISFDGSSEFYGDSVRGRFTISRDNSKNTLYLRVNSLRAEDTALYYCARRSLKYSMYNNDAFDVWGQGTTVTVSS

SEQ ID NO: 1610 - protein, 106 aa, Artificial Sequence
  Description of Artificial Sequence: Synthetic light chain variable region amino acid sequence
QPVLTQPPSVSVSPGQTASITCSGDKLGNKFTFWYQQKSGQSPVLVIYQESQRPSGIPERFSGSNSGNTATLTIRGAQAMDEADYYCQAWDSSTAFFGGGTKLTVL

SEQ ID NO: 1611 - protein, 124 aa, Artificial Sequence
  Description of Artificial Sequence: Synthetic heavy chain variable region amino acid sequence
QVQLVQSGGGVVQPGRSLRLSCAASGFTFSNYAMHWVRQAPGKGLEWVTLISYDGSAQDYADSVKGRITISRDNSKNTLYLQMSSLRPEDTAVYYCARYYCTNDVCSSSALDIWGQGTTVTVSS

SEQ ID NO: 1612 - protein, 106 aa, Artificial Sequence
  Description of Artificial Sequence: Synthetic light chain variable region amino acid sequence
SYELIQPPSVSVSPGQTASITCSGDKLGNKFTCWYQQKPGQSPVLVIYQDSKRPSGIPERFSGSNSGNTATLTISGTQAMDEADYYCQAWDSSTVVFGGRTKLTVL

SEQ ID NO: 1613 - protein, 126 aa, Artificial Sequence
  Description of Artificial Sequence: Synthetic heavy chain variable region amino acid sequence
QVTLKESGPALVKPTQTLTLTCTFSGFSLSTSRMCVSWIRQSPGKALEWLARIDWDDDKFFSTSLKTRLTISKDTSRNQVVLTMTNMDPVDTATYYCARTTVYASGGYYLYYFDYWGQGTLVTVSS

SEQ ID NO: 1614 - protein, 107 aa, Artificial Sequence
  Description of Artificial Sequence: Synthetic light chain variable region amino acid sequence
DIQLTQSPSSLPASVGDRVTITCRASQRIASYLNWYQQKPGKAPKVLIYAASNLQSGVPSRFSGSGSGTDFTLTINSLQPEDFATYYCQQSYTTPWTFGQGTKVEIK

SEQ ID NO: 1615 - protein, 132 aa, Artificial Sequence
  Description of Artificial Sequence: Synthetic heavy chain variable region amino acid sequence
EVQLVESGAGLLKPSETLSLTCVVYGGSFSGYYWSWIRQPPGKGLEWVGDINHSTTTNYNPSLESRITISIDTSKNQFSLNLSSVTAADSAVYYCARGPKECTSSSCDRFGVDYFYYGMDVWGRGTTVTVSS

SEQ ID NO: 1616 - protein, 111 aa, Artificial Sequence
  Description of Artificial Sequence: Synthetic light chain variable region amino acid sequence
QSVLTQPPSVSGAPGQRVTISCTGSSANIGAGYDVHWYQQFPGTAPKLLIFGNSNRPSGVPDRFSGSKSGTSASLAITGLQAEDEADYYCQSYDGTLGGWVFGGGTQLTVL

SEQ ID NO: 1617 - protein, 122 aa, Artificial Sequence
  Description of Artificial Sequence: Synthetic heavy chain variable region amino acid sequence
EVQLLESGGGLVQPGGSLRLSCAASEFTFSRYPMSWVRQAPGKGLEWVSGISVSGDSTYYADSVKGRLTISRDNSKNTLYLQMNSLRAEDTAVYYCAIDHYDTSGYYGMDVWGQGTTVTVSS

SEQ ID NO: 1618 - protein, 112 aa, Artificial Sequence
  Description of Artificial Sequence: Synthetic light chain variable region amino acid sequence
DIRLTQSPLSLPVTPGEPASISCRSSRSLLRSNGYNYLDWYLQKPGQSPQLLIYLGSNRASGVPDRFSGSGSGTDFTLKISRVEAEDVGVYYCMQALQSSYTFGQGTKLEIK

SEQ ID NO: 1619 - protein, 124 aa, Artificial Sequence
  Description of Artificial Sequence: Synthetic heavy chain variable region amino acid sequence
EVQLVESGGGLVKPGGSLRLSCAASGFTLSTYGVNWVRQAPGKGLEWVSSISSSGNNIHYADSVKGRFTVFRDNAKHSMYLQMNSLRAEDTAVYYCARSLDYSNYYYYYGLDVWGQGTTVTVSS

SEQ ID NO: 1620 - protein, 113 aa, Artificial Sequence
  Description of Artificial Sequence: Synthetic light chain variable region amino acid sequence
EIVLTQSPDSLAVSLGERATINCKSSQSIFYSSNNMNYLAWYQQKAGQPPKLLIYWASTRESGVPDRFSGSGSGTDFTLTISSLQAEDVAVYYCHQYYSIPLTFGGGTKVEIK

SEQ ID NO: 1621 - protein, 126 aa, Artificial Sequence
  Description of Artificial Sequence: Synthetic heavy chain variable region amino acid sequence
QVQLVESGAEVKKPGASVKVSCKASGYNFIDYGISWVRQAPGQGLEWVGWISAYNGNTNYAQKLQGRVTMTTDTSTNTAYMELRSLRSDDTALYYCARDSSSLHPTYYYYYPMDVWGQGTTVTVSS

SEQ ID NO: 1622 - protein, 109 aa, Artificial Sequence
  Description of Artificial Sequence: Synthetic light chain variable region amino acid sequence
DIVMTQSPATLSVSPGERATLSCRASQSVSSRLAWYQQKPGQAPRLLIYGASTRATDVPARFSGSGSGTEFTLTISSLQSEDFAVYYCQQYNNWPPERTFGQGTKVEIK

SEQ ID NO: 1623 - protein, 129 aa, Artificial Sequence
  Description of Artificial Sequence: Synthetic heavy chain variable region amino acid sequence
QVQLQQWGAGLLKPSETLSLTCGVYGGSFTGYQWSWIRQSPGKGLEWIGDIDHGGNTNYRPSLKSRIITSVNMSKKEFSLKLASVTAADTAVYYCARGVGFLEFSGGPTGRRRNWFDSWGQGTLVTVSS

SEQ ID NO: 1624 - protein, 108 aa, Artificial Sequence
  Description of Artificial Sequence: Synthetic light chain variable region amino acid sequence
DIQLTQSPGTLSLSPGEGATLSCRASQSVGGSYLAWYQQRPGQAPRLLIYGASNRAADSPDRFSGSGSATDFTLTISRLEPEDFAVYYCQQYGSSPWTFGQGTKVEIK

SEQ ID NO: 1625 - protein, 128 aa, Artificial Sequence
  Description of Artificial Sequence: Synthetic heavy chain variable region amino acid sequence
QITLKESGPTLVKPTQTLTLTCTFSGFSLSSSGVGVGWIRQPPGKALEWLALIYWDDDKRYSPSLKSRLTITKDTSKNQVVLTMTNMDPVDTATYYCAHRGPYYYDMSGYYYEAFDIWGQGTTVTVSS

SEQ ID NO: 1626 - protein, 109 aa, Artificial Sequence
  Description of Artificial Sequence: Synthetic light chain variable region amino acid sequence
SYELMQPPSVSVAPGQTARITCGGNNIGSKGVHWYQQKPGQAPVLVVYDDNDRPSGIPERFSGSNSGNTATLTISRVEAGDEADYYCQVWDSSSDHHYVFGTGTKVTVL

SEQ ID NO: 1627 - protein, 122 aa, Artificial Sequence
  Description of Artificial Sequence: Synthetic heavy chain variable region amino acid sequence
EVQLVESGVAVKKPGESLKISCKGSGYNFDSFWIGWVRQLPGKGLEWMGIIFPGDSDTRYGPSFQGQVTISADKSINTAYLQWRSLKASDTAMYYCARHGLGGYDNSGYNLWGHGTMVTVSS

SEQ ID NO: 1628 - protein, 107 aa, Artificial Sequence
  Description of Artificial Sequence: Synthetic light chain variable region amino acid sequence
DIVMTQSPSSLSASVGDRVTITCQASHDISTSLNWYQQKPGKAPNLLISDASTLERGVPSRFSGGGSGTEFTFTISSLQPEDIATYYCQQFENLPITFGQGTRLEIK

SEQ ID NO: 1629 - protein, 131 aa, Artificial Sequence
  Description of Artificial Sequence: Synthetic heavy chain variable region amino acid sequence
QVQLVQSGAEVKKPGASVRVSCKASGYTLTGYYIHWLRQAPGQGLEWVGRINPNTGETSYSQKFQGRVIMTRDTSVSTAYVDLSRLRSRDTAVYFCARSDVMITVTAEGDFSYYYYRFDVWGQGTTVTVSS

SEQ ID NO: 1630 - protein, 111 aa, Artificial Sequence
  Description of Artificial Sequence: Synthetic light chain variable region amino acid sequence
DIVMTQTPLSLPVTPGEPASISCRSSQSLLHSNGHNYLDWYLQKPGQSPQLLIYLGSIRASGVSDRFSGSGSGTDFTLKISRVEAEDVGIYYCMQALQTPHFGGGTKVEIK

SEQ ID NO: 1631 - protein, 118 aa, Artificial Sequence
  Description of Artificial Sequence: Synthetic heavy chain variable region amino acid sequence
QVQLVQSGAEVKKPGESLKISCKGSGYSFTNYWIGWVRQMPGKGLEWMGIIFPADSDTRYSPSFQGQVTISADKSVSTAYLQWTSLKASDTAIYYCARLGVAAAGGYWGQGTLVTVSS

SEQ ID NO: 1632 - protein, 107 aa, Artificial Sequence
  Description of Artificial Sequence: Synthetic light chain variable region amino acid sequence
DIQVTQSPSSLSASVGDRVTITCQASQDISNYLNWYQQKPGKAPKLLIHDASTLETGVPSRFSGRGSGTDFTFTISSLQPEDIATYYCQQYDNLPPTFGGGTKVEIK

SEQ ID NO: 1633 - protein, 123 aa, Artificial Sequence
  Description of Artificial Sequence: Synthetic heavy chain variable region amino acid sequence
QVQLVESGPGLVKPSETLSLTCTVSGGSISRYYWSWIRQSPGKGLEWIGYIYHSVITNYNPSLKSRVTISIDMSKNQFSLKLSSVTAADTAVYYCASRPLINGYGPDNYFDYWGQGTLVTVSS

SEQ ID NO: 1634 - protein, 108 aa, Artificial Sequence
  Description of Artificial Sequence: Synthetic light chain variable region amino acid sequence
SYVLTQPPSVSVAPGQTARITCGGNNIGSKSVHWYQRKPGQAPVLVVYDDSDRPSGIPERFSGSNSGNTATLTIIRVEAGDEADYYCQVWDNSSDHPVFGGGTKLTVL

SEQ ID NO: 1635 - protein, 120 aa, Artificial Sequence
  Description of Artificial Sequence: Synthetic heavy chain variable region amino acid sequence
QVQLVQSGAEVKKPGESLKISCKGSGYSFTNYWIGWVRQMPGKGLEWMGIIFSADSDTRYSPSFQGQVTISADKSISTAYLQWSSLKASDTAMYYCARQWGITGDAFDIWGQGTMVTVSS

SEQ ID NO: 1636 - protein, 107 aa, Artificial Sequence
  Description of Artificial Sequence: Synthetic light chain variable region amino acid sequence
DIQVTQSPSFLSASVGDRVTITCRASQGISGYLAWYQQKPGKAPKLLIYAASTLQSGVPSRFSGSGSGTEFTLTISSLQPEDFATYYCQQLNSYPYTFGQGTKVEIK

SEQ ID NO: 1637 - protein, 128 aa, Artificial Sequence
  Description of Artificial Sequence: Synthetic heavy chain variable region amino acid sequence
QVQLVQSGAEVKKPGSSVKVSCKASGGSFSSNTINWVRQAPGQGLEWMGGIIPVFETPNYAQKFQGRVSFTADESTRTAYMELSSLRSEDTAVYFCARQGMSYYDTNGNYYVGWFDTWGQGTLVTVSS

SEQ ID NO: 1638 - protein, 110 aa, Artificial Sequence
  Description of Artificial Sequence: Synthetic light chain variable region amino acid sequence
EIVLTQSPGTLSLSPGERATLSCRASQSLNNNYLAWYQRKPGQAPRLLIYGAGAFSRATGIPDRFSGSGSGTDFTLTISRLEPEDFALYYCQQYGSSPLTFGQGTRLEIK

SEQ ID NO: 1639 - protein, 124 aa, Artificial Sequence
  Description of Artificial Sequence: Synthetic heavy chain variable region amino acid sequence
QVQLQQWGPGLVKPSETLSLTCTVSGASITSHYWSWLRQPAGKGLEWIGRFYPSGTTEKTPSLKSRVTLSVDTSKNHFSLKLTSVTAADTAVYYCARDSYDDIAGSYEYYFADWGQGTLVTVSS

SEQ ID NO: 1640 - protein, 107 aa, Artificial Sequence
  Description of Artificial Sequence: Synthetic light chain variable region amino acid sequence
EIVLTQSPATLSVSPGERATLSCRASQSVSSNLAWYQQKPGQAPRLLIYDISTRATGVPARFSGSGSGTEFTLTITSLQSEDFTVYYCQQYNNWPPTFGQGTKLEIK

SEQ ID NO: 1641 - protein, 129 aa, Artificial Sequence
  Description of Artificial Sequence: Synthetic heavy chain variable region amino acid sequence
EVQLLESGGGVVQPGGSLRLSCAASGFTFSGYGMHWVRQAPGKGLEWVAFIQYNGSNKYYADSVKGRFTISRDNSKNTLYVQLNSLRAEDTAVYYCATDILVVPAATPLISYYFGMDVWGQGTTVTVSS

SEQ ID NO: 1642 - protein, 110 aa, Artificial Sequence
  Description of Artificial Sequence: Synthetic light chain variable region amino acid sequence
QSALTQPASVSGSPGQSITISCTGTSSDVGGYNYVSWYQQYPGKAPKLMIYEVTNRPSGVSNRFSGSKSGNTASLTISGLQAEDEADYYCCSYTSTNTRVFGTGTKVTVL

SEQ ID NO: 1643 - protein, 123 aa, Artificial Sequence
  Description of Artificial Sequence: Synthetic heavy chain variable region amino acid sequence
QVQLVQSGAEVKMPGASVRVSCKASGYTLGSHGITWVRQAPGQGLEWMGWISANNFNTHYAQKFQGRVTMTTDTSTSTAYMELRSLRSDDTAVYYCAREVMGHMVETISFDYWGQGTLVTVSS

SEQ ID NO: 1644 - protein, 108 aa, Artificial Sequence
  Description of Artificial Sequence: Synthetic light chain variable region amino acid sequence
QPVLTQPPSVSVAPGQTARITCGGNNIGSESVHWYQQKPGQAPVLVVHDDSDRPSGIPERFSGSNSGNTATLTISRVEAGDEADYYCQVWDFTPDHPVFGGGTKVTVL

SEQ ID NO: 1645 - protein, 122 aa, Artificial Sequence
  Description of Artificial Sequence: Synthetic heavy chain variable region amino acid sequence
QVQLQESGGGVVQPGGSLRLSCAASGFTFSRHWMHWVRQVPGKGLVWVSRINSDESTIDYADSVKGRFTISRDNAKNTLYLQMNSLRAEDTAVYYCVRDMVAVPGTTGGDYWGQGTLVTVSS

SEQ ID NO: 1646 - protein, 107 aa, Artificial Sequence
  Description of Artificial Sequence: Synthetic light chain variable region amino acid sequence
SYELTQPPSVSVSPGQTADITCSGDKLGDKYACWYQQRAGQSPILVLYQDTRRPSGIPERFSGSNSGDTATLTISGTQAMDEADYYCQAWDSSTAWVFGGGTKLTVL

SEQ ID NO: 1647 - protein, 120 aa, Artificial Sequence
  Description of Artificial Sequence: Synthetic heavy chain variable region amino acid sequence
QVQLVQSGGGLVKPGGSLRLSCAASGFTFSSYSMNWVRQAPGKGLEWVSSISSSSSYIYYADSVKGRFTISRDNAKNSLYLQMNSLRAEDTAVYYCARVLSGYSYGYDYWGQGTLVTVSS

SEQ ID NO: 1648 - protein, 111 aa, Artificial Sequence; identical to SEQ ID NO: 740
  Description of Artificial Sequence: Synthetic light chain variable region amino acid sequence

SEQ ID NO: 1649 - protein, 127 aa, Artificial Sequence
  Description of Artificial Sequence: Synthetic heavy chain variable region amino acid sequence
EVQLVESGGGLVQPGGSLRLSCAASGFTFSSYAMSWVRQAPGKGLEWVSAISGSGGSTYYADSVKGRFTISRDNSKNTLYLQMNSLRAEDTAVYYCAKDFTVVHPLQQLTYYYFDYWGQGTLVTVSS

SEQ ID NO: 1650 - protein, 109 aa, Artificial Sequence
  Description of Artificial Sequence: Synthetic light chain variable region amino acid sequence
DIVLTQSPATLSLSPGERATLSCRASQSVSSYLAWYQQKPGQAPRLLIYDASNRATGIPARFSGSGSGTDFTLTISSLEPEDFAVYYCQQRSNWPPGFTFGGGTKVEIK

SEQ ID NO: 1651 - protein, 127 aa, Artificial Sequence
  Description of Artificial Sequence: Synthetic heavy chain variable region amino acid sequence
QVQLVQSGAEVKKPGSSVKVSCKASGGTFSSYAISWVRQAPGQGLEWMGGIIPIFGTANYAQKFQGRVTITADESTSTAYMELSSLRSEDTAVYYCARGWRGGGMTGSYYYYGMDVWGQGTTVTVSS

SEQ ID NO: 1652 - protein, 104 aa, Artificial Sequence
  Description of Artificial Sequence: Synthetic light chain variable region amino acid sequence
DIQVTQTPSTLSASVGDRVTITCRASQSISSWLAWYQQKPGKAPKLLIYKASSLESGVPSRFSGSGSGTEFTLTISSLQPDDFATYYCQQHRGTFGQGTKVDIK

SEQ ID NO: 1653 - protein, 124 aa, Artificial Sequence
  Description of Artificial Sequence: Synthetic heavy chain variable region amino acid sequence
EMQLMQSGGVVVQPGGSLRLSCAASGFTFDDYAMHWVRQAPGKGLEWVSLISWDGGSTYYADSVKGRFTISRDNSKNSLYLQMNSLRAEDTALYYCAKDFDPLVVPAAMCFDYWGQGTLVTVSS

SEQ ID NO: 1654 - protein, 111 aa, Artificial Sequence
  Description of Artificial Sequence: Synthetic light chain variable region amino acid sequence
QSVLIQPASVSGSPGQSITISCTGTSSDVGGYNYVSWYQQHPGKAPKLMIYDVSNRPSGVSNRFSGSKSGNTASLTISGLQAEDEADYYCSSYTSSSTLYVFGTGTKLTVL

SEQ ID NO: 1655 - protein, 121 aa, Artificial Sequence
  Description of Artificial Sequence: Synthetic heavy chain variable region amino acid sequence
EVQLVESGGGLVQLGGPLRLSCAASGFTFSSYAMSWVRQAPGKGLEWVSAISGSGGSTYYADSVKGRFTISRDNSKNTLYLQMNSLRAEDTAVYYCAKGFERDYADAFDIWGQGTTVTVSS

SEQ ID NO: 1656 - protein, 107 aa, Artificial Sequence
  Description of Artificial Sequence: Synthetic light chain variable region amino acid sequence
DIRMTQSPSSVSASVGDRVTITCRASQGISSWLAWYQQKPGKAPKLLIYAASSLQSGVPSRFSGSGSGTDFTLTISSLQPEDFATYYCQQANSFPITFGQGTRLEIK

SEQ ID NO: 1657 - protein, 116 aa, Artificial Sequence
  Description of Artificial Sequence: Synthetic heavy chain variable region amino acid sequence
EVQLVQSGAEVKKPGASVKVSCKASGYTFTSYDINWVRQATGQGLEWMGWMNPNSGNTGYAQKFQGRVTMTRNTSISTAYMELSSLRSEDTAVYYCATRPAALDYWGQGTLVTVSS

SEQ ID NO: 1658 - protein, 106 aa, Artificial Sequence
  Description of Artificial Sequence: Synthetic light chain variable region amino acid sequence
QPVLTQPLSVSVALGQTARITCGGNNIGSKNVHWYQQKPGQAPVLIIYRDSNRPSGIPERFSGSNSGNTATLTISRAQAGDEADYYCQVWDSSTWVFGGGTKLTVL

SEQ ID NO: 1659 - protein, 120 aa, Artificial Sequence
  Description of Artificial Sequence: Synthetic heavy chain variable region amino acid sequence
QVQLVQSGGGLVKPGGSLRLSCAASGFTFRDFYMSWIRQAPGKGLEWVSNISPSSTYTNYADSVKGRFTISRDNAKNSLYLQMNSLRAEDTAVYYCVKSEGYSSGWYDYWGQGTLVTVSS

SEQ ID NO: 1660 - protein, 111 aa, Artificial Sequence
  Description of Artificial Sequence: Synthetic light chain variable region amino acid sequence
QPVLTQPPSVSGAPGQRVTISCTGSSSNIGAGYDVNWYHQLPGAAPKLLIYTNSNRPSGVPDRFSGSKSGTSASLAITGLQAEDEADYYCQSYDSSLSGYVFGTGTKLTVL

SEQ ID NO: 1661 - protein, 136 aa, Artificial Sequence
  Description of Artificial Sequence: Synthetic heavy chain variable region amino acid sequence
EVQLVESGGGLVQPGGSLRLSCAASGFTFNRFAMSWVRQAPGKGLEWVSGISGSGGSTLYADSVKGRFTISRDNSKNTLYLQINSLRVEDTAVYYCASRSSYDDVWNGYVDWDWGFDFYYYGMDVWGQGTTVTVSS

SEQ ID NO: 1662 - protein, 110 aa, Artificial Sequence
  Description of Artificial Sequence: Synthetic light chain variable region amino acid sequence
QAVVTQEPSMSAAPGQKVTISCSGGDSNIRNNYVFWYQQLPGTAPKLLIYDNTKRPSGIPGRFSGSKSGASATLDITGLQTGDEADYYCGTWDSSLSALVFGGGTQLTVL

SEQ ID NO: 1663 - protein, 123 aa, Artificial Sequence
  Description of Artificial Sequence: Synthetic heavy chain variable region amino acid sequence
EVQLLESGGGVVQPGRSLRLSCAASGFSFRNYDMHWVRQAPGKGLEWVAIISYDGSNKYADSVKGRFTISRDTSKNTLYLQMNSLRVEDTAVYYCARADSSGYYKGSEYFQHWGQGTLVTVSS

SEQ ID NO: 1664 - protein, 108 aa, Artificial Sequence
  Description of Artificial Sequence: Synthetic light chain variable region amino acid sequence
SYELTQLPSVSVAPGQTARITCGGNNIGTKSVQWYQHKPGQAPVLVVYDDSDRPSDIPERFSGSNSGNTATLTISRVEAGDEADYYCQVWDSSSDHYVFGTGTKLTVL

SEQ ID NO: 1665 - protein, 128 aa, Artificial Sequence
  Description of Artificial Sequence: Synthetic heavy chain variable region amino acid sequence
EVQLVQSGGGLVQPGGSLRVSCAASGLTVSTNYMSWVRQLPGKGLEWVSVIYSGGNTYYADSVKGRFTISRDNSKNIVYLEMNSLRIEDTAVYYCARAHLNNWFVSVTDTKDYYFDYWGQGTLVTVSS

SEQ ID NO: 1666 - protein, 106 aa, Artificial Sequence
  Description of Artificial Sequence: Synthetic light chain variable region amino acid sequence
SYELTQPPSVSVLPGQTASITCSGDKLGDKYASWYQQKPGQSPILVVFQDDKRPSGIPERFSGSNSGNTATLTISGTQATDEADYYCQACDRNTGVFGTGTKLTVL

SEQ ID NO: 1667 - protein, 122 aa, Artificial Sequence
  Description of Artificial Sequence: Synthetic heavy chain variable region amino acid sequence
EVQLLESGGGLVQPGGSLRLSCAASGFTFSPYSMNWVRQAPGKGLEWVSYISRSGSFKYYADSVKGRFTISRDDAKNSLYLHMNSLRDDDTAVYYCVSYCSSATCHQRFDYWGQGTLVTVSS

SEQ ID NO: 1668 - protein, 108 aa, Artificial Sequence
  Description of Artificial Sequence: Synthetic light chain variable region amino acid sequence
EIVLTQSPATLSLSPGERATLSCRASQSVNSYLAWYQQKPGQAPRLLIYDASNRATGIPARFSGSGSGTDFTLTISSLEPEDFAVYYCQERNSWPKLTFGGGTKVEIK

SEQ ID NO: 1669 - protein, 123 aa, Artificial Sequence
  Description of Artificial Sequence: Synthetic heavy chain variable region amino acid sequence
EVQLVESETEVKKPGASVKVSCKASGYTFTKYGISWVRQAPGQGLEWMGWISAYNGNTMYPHKLLGRVTMTTDTSTSTAYMELRSLRSDDTAVYYCARDQTYYDFWSGYYTYWGQGTLVTVSS

SEQ ID NO: 1670 - protein, 107 aa, Artificial Sequence
  Description of Artificial Sequence: Synthetic light chain variable region amino acid sequence
DIVMTQTPSTLSASVGDRVTITCRASQSISSWLAWYQQKPGKAPKLLIYKASSLESGVPSRFSGSGSGTEFTLTISSLQPDDSATYYCQQYNSYSRTFGQGTKVEIK

SEQ ID NO: 1671 - protein, 119 aa, Artificial Sequence
  Description of Artificial Sequence: Synthetic heavy chain variable region amino acid sequence
EVQLVESGGGLVQPGGSLRLSCAASGFTFSSYPMNWVRQGPGKGLEWVSSISSSGASPYYADSVKGRFTISRDNSKNTLYLQMNSLRADDTAVYYCAREDYYYYYMDVWGKGTTVTVSS

SEQ ID NO: 1672 - protein, 107 aa, Artificial Sequence
  Description of Artificial Sequence: Synthetic light chain variable region amino acid sequence
ETTLTQSPSTLSASVGDRVTITCRASESISSWLAWYQQKPGKAPKLLIFKASTVQSGVPSRFSGSGSGTEFTLTISSLQPDDFATYYCQQYNSYLLTFGGGTKVEIK

SEQ ID NO: 1673 - protein, 134 aa, Artificial Sequence
  Description of Artificial Sequence: Synthetic heavy chain variable region amino acid sequence
EVQLVESGPGLVKPSQTLSLTCSVSGGSISSGIHYWSWIRQHPGKGLEWIGYIYYSGSTYYNPSLESRITISVDTSKNQFSLKVSSVTAADTAVYYCARVNRASRMTTFGVANERSIYYFMDVWGKGTTVTVSS

SEQ ID NO: 1674 - protein, 107 aa, Artificial Sequence
  Description of Artificial Sequence: Synthetic light chain variable region amino acid sequence
ETTLTQSPATLSLSPGERATLSCRATQSVGNYLAWYQQKPGQAPRLLIHDASNRATGIPARFSGSGSGTDFTLTISSLEPEDFAVYYCQLRINWLFTFGPGTKVEIK

SEQ ID NO: 1675 - protein, 119 aa, Artificial Sequence
  Description of Artificial Sequence: Synthetic heavy chain variable region amino acid sequence
EVQLLESGGGLVKPGGSLRLSCAASGFSFSSYSMHWVRQAPGKGLEWVSSISSSSTYIYYADSVKGRFTISRDNAKTSLFLQMNSLRAEDTAVYYCARDPYSSGWYWDWGQGTTVTVSS

SEQ ID NO: 1676 - protein, 107 aa, Artificial Sequence
  Description of Artificial Sequence: Synthetic light chain variable region amino acid sequence
EIVMTQSPATLSVSPGERATLSCRASQSVSGNLAWYQQKPGQAPRLLIYGASTRATGIPARFSGSGSGTEFTLTISSLQSEDFAVYYCHQYNNRPATFGQGTKVDIK

SEQ ID NO: 1677 - protein, 121 aa, Artificial Sequence
  Description of Artificial Sequence: Synthetic heavy chain variable region amino acid sequence
EVQLLESGPGLVKPSETLSLTCNVSGGSISSYYWSWIRQSPGKGLEWIGHIYDTGYTNYNPSLKSRVTMSVDTSKNRFSLKLDSVTAADTAVYYCARGRGWRNLYNWFDPWGQGTLVTVSS

SEQ ID NO: 1678 - protein, 107 aa, Artificial Sequence
  Description of Artificial Sequence: Synthetic light chain variable region amino acid sequence
DIVMTQSPATLSVSPGERATLSCRTSQSFSSMLAWYQQKPGQAPRLLIYGASTRATGIPARFSGSGSATEFTLTISNLQSEDVAVYYCQQYNSWPLTFGGGTKVEIK

SEQ ID NO: 1679 - protein, 123 aa, Artificial Sequence
  Description of Artificial Sequence: Synthetic heavy chain variable region amino acid sequence
EVQLLESGGGLVKPGGSLRLSCEVSGFPFSDYYVSWIRQAPGKGLEWLSYSSRGGIYTNYADSVKGRFTISRDNDKNSLFLQMNSLRAEDTAVYYCARDRSDIWSGRVGFDYWGQGTLVTVSS

SEQ ID NO: 1680 - protein, 110 aa, Artificial Sequence
  Description of Artificial Sequence: Synthetic light chain variable region amino acid sequence
DIVMTQSPATLSLSPGERATLSCRASQSVSSSYLAWYQQKPGQAPRLLIYGASSRATGIPDRFSGSGSGTDFTLTISRLEPEDFAVYYCQQYNKSPPGYIFGPGTKVDIK

SEQ ID NO: 1681 - protein, 122 aa, Artificial Sequence
  Description of Artificial Sequence: Synthetic heavy chain variable region amino acid sequence
QVQLVQSGPTLVKPTQTLTLTCSFSGFSLTNTGVGVGWIRQPPGKALEWLALIYWDDDKRYRPSLKSRLTITKDTSKSQVVLTMTNMDPLDTATYYCAHRRSAYDPIYFDYWGQGALVTVSS

SEQ ID NO: 1682 - protein, 108 aa, Artificial Sequence
  Description of Artificial Sequence: Synthetic light chain variable region amino acid sequence
DIRVTQSPSSVSASVGDRVTITCRASRSINNWLAWYQQKPGKAPKLLIYAASSLQSGVPSRFSGSGYGTDFTLTISSLQPEDFATYYCQQAHSFPSITFGQGTRLEIK

SEQ ID NO: 1683 - protein, 126 aa, Artificial Sequence
  Description of Artificial Sequence: Synthetic heavy chain variable region amino acid sequence
QVQLVQSGAEVKKPGASVRVSCKTSGYAFSKYGISWVRQAPGQGLEWIGWISAYNENTHFSHKFLGRVTMTTDTSTGIAYMDLRSLKSDDTAVYYCARDWYSLGSDWYFGPMFDYWGQGTLVTVSS

SEQ ID NO: 1684 - protein, 107 aa, Artificial Sequence
  Description of Artificial Sequence: Synthetic light chain variable region amino acid sequence
EIVLTQSPDTLSVSPGERATLSCRASQSVTTNLAWYQQKPGHAPRLLIYGASTRATGIPARFSGSGSGTEFTLTISSLQSEDFAIYYCQQYTNWPRTFGQGTKVEIK

SEQ ID NO: 1685 - protein, 116 aa, Artificial Sequence
  Description of Artificial Sequence: Synthetic heavy chain variable region amino acid sequence
QVQLVESGPGLVKPSETLSLTCTVSDDSITNNFWTWIRQPPGKGLEWIGYIYYSGSTNYNPSLKSRITMSVDLSKNQFSLKLSSVTAADTAVYYCARLTSGGVDYWGQGTLVTVSS

SEQ ID NO: 1686 - protein, 111 aa, Artificial Sequence
  Description of Artificial Sequence: Synthetic light chain variable region amino acid sequence
QSVLTQPPSLSGAPGQRVTISCTGSSSNIGADYHVHWYQQLPGTAPKLLIYQNTNRPSGVPDRFSASKSGTSVSLAITGLQAEDEADYYCQSYDSSLSAWVFGGGTKLTVL

SEQ ID NO: 1687 - protein, 129 aa, Artificial Sequence
  Description of Artificial Sequence: Synthetic heavy chain variable region amino acid sequence
QVQLVQSGAEVKKPGSSVKVSCKAFGGTLRRYALSWVRQAPGQGLEWMGGIIPVFGTRRYAQKFQGRITITADGSTSTASMEVSSLRFEDTAIYYCATVYFDFVSGPPPTYYYYYMDVWGKGTTVTVSS

SEQ ID NO: 1688 - protein, 110 aa, Artificial Sequence
  Description of Artificial Sequence: Synthetic light chain variable region amino acid sequence
DIVMTQSPGTLSLSPGERATLSCRASQSVSSSYLAWYQQKPGQAPRLLIYGASSRATGIPDRFSGSGSGTDFTLTISRLEPEDFAVYYCQQYDSSLRVLTFGGGTKVDIK

SEQ ID NO: 1689 - protein, 123 aa, Artificial Sequence
  Description of Artificial Sequence: Synthetic heavy chain variable region amino acid sequence
QVQLQQWGAGLLKPSETLSLTCEVYGGSFSGYYWTWFRQPPGEGLEWIGEINHSGGTNYNPSLKSRVTMSVDASINQFSLQLSSVTAADTSVYYCARGHYYNTNDFYGLFDYWGQGTLVTVSS

SEQ ID NO: 1690 - protein, 108 aa, Artificial Sequence
  Description of Artificial Sequence: Synthetic light chain variable region amino acid sequence
DIRLTQSPSFLSASVGDRVTITCRASQGISTYLAWYQQKPGKAPKLLLYAASTLHSGVPSRFSGSGSGTEFTLTISSLQPEDFATYYCQQLNRYPPSTFGPGTKLEIK

SEQ ID NO: 1691 - protein, 130 aa, Artificial Sequence
  Description of Artificial Sequence: Synthetic heavy chain variable region amino acid sequence
QVQLQQWGARLLKPSETLSLTCAVYGGSFSGYYWSWIRQSPGKGLEWIGEINHSGSTNYNPSLKSRVTISRDTSKKQFSLKVSSVTAADTAVYYCARDPPIRCNGDSCKSDQYRYGMDVWGQGTTVTVSS

SEQ ID NO: 1692 - protein, 108 aa, Artificial Sequence
  Description of Artificial Sequence: Synthetic light chain variable region amino acid sequence
QPGLTQPPSVSVSPGQTARITCSGDALPKQYAYWYQQKPGQAPVLVIHKDNERPSGIPERFSGSSSGTTVTLTISGVQAEDEADYYCQSADTSGSYRLFGGGTKLTVL

SEQ ID NO: 1693 - protein, 128 aa, Artificial Sequence
  Description of Artificial Sequence: Synthetic heavy chain variable region amino acid sequence
EVQLLESGAEVKKPGSSVKVSCKASGGTFSTYAISWVRQAPGQGLEWMGGIIPVLGTTKYAQKFQDRVTITADESTSTAYMDLSGLRSDDTAVYYCARGVWGDCGRASCLFDWYFDLWGRGTLVTVSS

SEQ ID NO: 1694 - protein, 108 aa, Artificial Sequence
  Description of Artificial Sequence: Synthetic light chain variable region amino acid sequence
EIVMTQSPATLSVSPGERVTLSCSASQTVSSNLAWYQQKPGQAPRLLIYGASIRATDIPARFSGSGSRTEFTLTISSLQSEDFAVYYCQQYNNRPPLTFGGGTKVEIK

SEQ ID NO: 1695 - protein, 127 aa, Artificial Sequence
  Description of Artificial Sequence: Synthetic heavy chain variable region amino acid sequence
QVQLVQSGAEVKKPGSSVKVSCMASGGTFSNSAINWVRQAPGQGLEWMGGTIPIFGAANYAQRFQARVTITADKSTSTAYMELTSLRSDDTAVYYCVRTPHRSSDHIWGSYRYFDSWGQGTLVTVSS

SEQ ID NO: 1696 - protein, 111 aa, Artificial Sequence
  Description of Artificial Sequence: Synthetic light chain variable region amino acid sequence
QSVVTQEPSVSAAPGQKITISCSGSTSNIGINYVSWYQQFPGTAPKLLIYDNDKRPSGIPDRFSGSKSGTSATLGITGLQAGDEADYYCGTWDSSLSAGHIFGGGTKVTVL

SEQ ID NO: 1697 - protein, 125 aa, Artificial Sequence
  Description of Artificial Sequence: Synthetic heavy chain variable region amino acid sequence
EVQLLESGGGLVKPGGSLRLSCEASGFPFNSYHMNWIRQSPGKGLEWVSYITGGSSFSNYADSVKGRFTISRDNAKNSLYLQMNSLRAEDTAVYYCARTTLDCTSTSCHYRFDYWGQGTLVTVSS

SEQ ID NO: 1698 - protein, 112 aa, Artificial Sequence
  Description of Artificial Sequence: Synthetic light chain variable region amino acid sequence
QSVLTQPPSVSGAPGQRITISCNGSNSNIGAGYDVHWYQQLPGKAPKLLIYSNNNRPSGVPDRFSGSKSGTSASLAITGLQGEDEADYYCQSHDTRLSGNVVFGGGTKLTVL

SEQ ID NO: 1699 - protein, 120 aa, Artificial Sequence
  Description of Artificial Sequence: Synthetic heavy chain variable region amino acid sequence
QITLKESGPTLVKPTQTLTLTCTFSGFSLSTSGVGVAWIRQPPGKALEWLALIYWDDDKRYSPSLKSRLTITKDTSKNQVVLTMTNMDPVDTATYYCAHSSVYTTPFDYWGQGSLVTVSS

SEQ ID NO: 1700 - protein, 106 aa, Artificial Sequence
  Description of Artificial Sequence: Synthetic light chain variable region amino acid sequence
DIQLTQSPSTLSASVGDRVTITCRASQSISDWLAWYQQKPGKAPKLLIYKAFTLESGVPSRFSGSGSGTEFTLTISSLQPDDFATYYCQQYTSYWTFGQGTKVEIK

SEQ ID NO: 1701 - protein, 121 aa, Artificial Sequence
  Description of Artificial Sequence: Synthetic heavy chain variable region amino acid sequence
QVTLKESGPTLVKPTQTLTLSCSFSGFSLSAYAVGVGWIRQPPGKALEWLALIYWDDDKRYSPSLETRLTITKDTSKNQVVLTMTKMDPVDTATYYCVYSYNGYYEYMDVWGNGTTVTVSS

SEQ ID NO: 1702 - protein, 107 aa, Artificial Sequence
  Description of Artificial Sequence: Synthetic light chain variable region amino acid sequence
DIVMTQSPATLSLSPGERATLSCRASQSVSNYLAWYQQKPGQAPRLLISGASNRATGIPDRFSGSGSGTDFTLTITTPEPEDFAVYYCQQRNAWPRTFGQGTKVEIK

SEQ ID NO: 1703 - protein, 124 aa, Artificial Sequence
  Description of Artificial Sequence: Synthetic heavy chain variable region amino acid sequence
EVQLVESGGGVVQPGRSLRLSCAASGFTLSSYVMDWVRQAPGKGLEWVAVISYDGSSKYYADSVKGRFTVSRDNSNNAMYLQMNSLRAEDTAVYYCARDPYYDILTGYSYFDYWGHGTTVTVSS

SEQ ID NO: 1704 - protein, 110 aa, Artificial Sequence
  Description of Artificial Sequence: Synthetic light chain variable region amino acid sequence
SYVLTQPPSVSGAPRQTATITCGGNNIGSKSVNWYQQKPGQAPVLVVYDDSARPSGIPERFSGSNSGNTATLTVSSVEAGDEADYFCQVWDTSSAPYPWVFGGGTKLTVL

SEQ ID NO: 1705 - protein, 119 aa, Artificial Sequence
  Description of Artificial Sequence: Synthetic heavy chain variable region amino acid sequence
QVQLVESGAEARKPGSSVKVSCKLSGGTFSTDPISWVRQAPGQGLEWMGRIIPLLGIANYAQKFQGRVTIIADKSTSTVYMELRNLRFEDTAVYFCARRGDGYYGMDVWGQGTTVTVSS

SEQ ID NO: 1706 - protein, 111 aa, Artificial Sequence
  Description of Artificial Sequence: Synthetic light chain variable region amino acid sequence
QSVLTQPASVSGSPGQSITISCTGTSNDIGGYDYVSWYQQHPGKAPKLMIYDVHNRPSGVSNRFSGSKSGNTASLTISGLQAEDEADYYCSSFSDSGNLYVFGTGTKLTVL

SEQ ID NO: 1707 - protein, 127 aa, Artificial Sequence
  Description of Artificial Sequence: Synthetic heavy chain variable region amino acid sequence
QVQLQQWGAGLLKPSETLSLTCAVYGGSFSGYYWSWIRQPPGKGLEWIGEMNHSGGSNYNPSFKSRVTISVDTSKKYFSLNLSSVTAADTAIYYCARTPFYYESTGYYYYYYGMDVWGQGTTVTVSS

SEQ ID NO: 1708 - protein, 113 aa, Artificial Sequence
  Description of Artificial Sequence: Synthetic light chain variable region amino acid sequence
DIVMTQTPDSLAVSLGERATINCKSSQSVSHSSNNKNYLSWYQQKPGQPPKLLIYWASIRESEAPDRFTGSGSGTDFTLTISSLQAEDVAVYYCQQYYTAPITFGQGTRLEIK

SEQ ID NO: 1709 - protein, 123 aa, Artificial Sequence
  Description of Artificial Sequence: Synthetic heavy chain variable region amino acid sequence
EVQLLESGSELKKPGASVKISCKTSGYTFTNYLMNWVRQAPGQGLEWMGWINTHTGNPTYAQDFTGRFVFSLDTSVNTAYLQISSLKAEDTAIYYCARDGLEAFSGYNGVDYWGQGTLVTVSS

SEQ ID NO: 1710 - protein, 112 aa, Artificial Sequence
  Description of Artificial Sequence: Synthetic light chain variable region amino acid sequence
DIVMTQTPLSLPVTPGEPASISCRSSPSLLHSNGYNYLDWYLQKPGQSPQLLIYLGSTRASGVPDRFSGSGSGTDFTLRISRVEAEDVGVYYCMQALQIPLTFGQGTKLEIK

SEQ ID NO: 1711 - protein, 124 aa, Artificial Sequence
  Description of Artificial Sequence: Synthetic heavy chain variable region amino acid sequence
EVQLVESGPGLVKPSQTLSLTCTVSGGPISSGVYYWSWIRQHPGKGLESIGYIYYSGSTHYNPSLKTRVTISLDTSKNQFSLKLSSVTAADTAVYYCARGCSGGSCYLYAFDIWGQGTTVTVSS

SEQ ID NO: 1712 - protein, 108 aa, Artificial Sequence
  Description of Artificial Sequence: Synthetic light chain variable region amino acid sequence
QPVLTQPPSVSVAPGQTARITCGGNNIGTKSVHWYQQKPGQAPLLVVYDDSDRPSGIPERFSGSNSGNTATLTISRVEAGDEADFYCQVWDYATDHVVFGGGTKLTVL

SEQ ID NO: 1713 - protein, 119 aa, Artificial Sequence
  Description of Artificial Sequence: Synthetic heavy chain variable region amino acid sequence
QVQLVQSGAEVKKPGSSVKVSCKASGGTFSRHTITWVRQAPGQGLEWMGRIAPIVGFANYAQKFQGRVTITADKSTSTAYMELRSLRSEDTAVYYCARRSEDYYGLDVWGQGTTVTVSS

SEQ ID NO: 1714 - protein, 104 aa, Artificial Sequence
  Description of Artificial Sequence: Synthetic light chain variable region amino acid sequence
DIVMTQSPSSLSASVGDRVTITCQASQDISNYLNWYQQKPGKAPKLLIYEASNLETGVPSRFSGSGSGTDFTFTISSLQPEDIATYYCQQYDNLFGGGTKLEIK

SEQ ID NO: 1715 - protein, 121 aa, Artificial Sequence
  Description of Artificial Sequence: Synthetic heavy chain variable region amino acid sequence
QVQLVESGAEVKKPGASVKVSCKASGYTFTDYYIHWVRQAPGQGLEWVGRINPNSGYINYAQKFQGRLTMTRDTSISTAYLELSSLRSDDTAVYYCTRLPLLEPLNFFDYWGQGTLVTVSS

SEQ ID NO: 1716 - protein, 112 aa, Artificial Sequence
  Description of Artificial Sequence: Synthetic light chain variable region amino acid sequence
QSVVTQPPSVSGAPGQRVTISCTGSSSNIGAGYDVHWYQQLPGTAPKVLIYGNNNRPSGVPDRFSGSKSGTSASLAITGLQAEDEADYYCQSFDSSLSSSYVFGTGTKLTVL

SEQ ID NO: 1717 - protein, 123 aa, Artificial Sequence
  Description of Artificial Sequence: Synthetic heavy chain variable region amino acid sequence
EVQLLESGGGLVKPGGSLRLSCAASGFTFADYYMSWIRQAPGKGLEWVSYISGGSSFTNYADSVKGRFTISRDNAKNSLYLQMNSLRADDTAVYYCARGISPALGGGEYFQDWGQGTLVTVSS

SEQ ID NO: 1718 - protein, 111 aa, Artificial Sequence
  Description of Artificial Sequence: Synthetic light chain variable region amino acid sequence
QPVLTQPPSVSGAPGQRVTISCTGSSSNIGAGYDVHWYQHLPGTAPKLLIYGNSNRPSGVPDRFSGSKSSTSASLAITGLQAEDEADYYCQSYDSSLGGYVFGTGTKVTVL

SEQ ID NO: 1719 - protein, 115 aa, Artificial Sequence
  Description of Artificial Sequence: Synthetic heavy chain variable region amino acid sequence
QVQLQQWGAGLLKPSETLSLTCAVYGGSFSGYSWSWIRQPPGKGLEWIGDIDHDGSTYYNSSLKSRVTMSIDTSKNQFSLKLSSVTAADTAVYYCARVGGNSGYWGQGTLVTVSS

SEQ ID NO: 1720 - protein, 111 aa, Artificial Sequence
  Description of Artificial Sequence: Synthetic light chain variable region amino acid sequence
DIVMTQTPLSLPVTPGEPASISCRSSQSLLHSNGFNYLDWYLQKPGQSPQLLIYLGSNRASGVPDRFSGSGSGTDFTLKISRVEAEDVGVYYCMQALQTLTFGPGTKVEIK

SEQ ID NO: 1721 - protein, 115 aa, Artificial Sequence
  Description of Artificial Sequence: Synthetic heavy chain variable region amino acid sequence
QVQLVQSGAGLLKPSETLSLTCAVYGGSFSGYSWSWIRQPPGKGLEWIGEINYSVSTSYNSSLKSRVSISVDTSKNQFSLKLTSVTAADTAVYYCARVGGAVADWGQGTLVTVSS

SEQ ID NO: 1722 - protein, 111 aa, Artificial Sequence
  Description of Artificial Sequence: Synthetic light chain variable region amino acid sequence
EIVLTQSPLSLPVTPGEPASISCRSSQRLLHSNGYNYLDWYLQKPGQSPQLLIYLGSNRASGVPDRFSGSGSGTDFTLKISRVEAEDVGVYYCMQNLQTLTFGGGTKVDIK

SEQ ID NO: 1723 - protein, 122 aa, Artificial Sequence
  Description of Artificial Sequence: Synthetic heavy chain variable region amino acid sequence
QVQLVESGPTLVKPTQTLTLTCTFSGFSLSTNGVGVAWIRQPPGKALEWLAIIYWDDDKRYSPSLKSRLTITKDTSKNQVVLTVTDMDPVDTATYYCAHTIGVPAATRFDYWGQGTLVTVSS

SEQ ID NO: 1724 - protein, 108 aa, Artificial Sequence
  Description of Artificial Sequence: Synthetic light chain variable region amino acid sequence
SYELTQPPSVSVSPGQTASITCSGDKLGDKFACWYQQKPGQSPVLVIYQDNKRPSGIPERFSGSNSGNTATLTISGTQAMDEADYYCQAWDSSTASYVFGTGTKLTVL

SEQ ID NO: 1725 - protein, 122 aa, Artificial Sequence
  Description of Artificial Sequence: Synthetic heavy chain variable region amino acid sequence
EVQLLESGGGLVQPGGSLRLSCAASGFTFNFFALTWVRQAPGKGLEWVSAISGSGESTYYADSVKGRFTISRDNSKNTLYLQMNSLRAEDTAVYYCAKFARSGDYASFFDYWGQGTLVTVSS

SEQ ID NO: 1726 - protein, 113 aa, Artificial Sequence
  Description of Artificial Sequence: Synthetic light chain variable region amino acid sequence
DIRVTQSPDSLAVSLGERATINCKSSQNVFYSSNNKNFLAWYQQKPGQPPKLLIYWASTRESGIPDRFSGSGSGTDFTLTISSLQAEDVAVYYCQQYYSTKFTFGPGTKVEIK

SEQ ID NO: 1727 - protein, 122 aa, Artificial Sequence
  Description of Artificial Sequence: Synthetic heavy chain variable region amino acid sequence
EVQLVQSGGGLVKPGGSLRLSCTASGFTFSDHYMSWIRQAPGKGLEWISYISSTSSFTNYANSVKGRFTISRDNAKNSLYLQMNSLRAEDTAVYYCARDRSILYSGYSLDYWGQGTLVTVSS

SEQ ID NO: 1728 - protein, 106 aa, Artificial Sequence
  Description of Artificial Sequence: Synthetic light chain variable region amino acid sequence
DIQMTQSPSSLSASVGDRVTISCRASQSILNYLNWYQHKPGKAPKLLIYAASSLQSGVPSRFSGSGSGTDFTLTISGLQPEDFATYYCQQSDSTRTFGQGTKVEIK

SEQ ID NO: 1729 - protein, 122 aa, Artificial Sequence
  Description of Artificial Sequence: Synthetic heavy chain variable region amino acid sequence
QVTLKESGGGLVKPGGSLRLSCAASGFTFSDYYMSWIRQAPGKGLEWVSYISSSSSYTNYADSVKGRFTISRDNAKNSLYLQMNSLRAEDTAVYYCAREAVAAAGTDYFDYWGQGTLVTVSS

SEQ ID NO: 1730 - protein, 111 aa, Artificial Sequence
  Description of Artificial Sequence: Synthetic light chain variable region amino acid sequence
QSVLTQPPSVSGAPGQRVTISCTGSSSNIGAGYDVHWYQQPPRTAPKLLIYGNSNRPSGVPDRFSGSKSGTSASLAITGLQAEDEADYYCQSYDSSLSGYVFGTGTKLTVL

SEQ ID NO: 1731 - protein, 126 aa, Artificial Sequence
  Description of Artificial Sequence: Synthetic heavy chain variable region amino acid sequence
EVQLVESGSELKKPGASVKVSCKASGYTFRTYVMNWVRQAPGQGLEWMGWINTNTGNPTYAQGFTGRFVFSLDTSVSTAYLQISSLKAEDTAVYYCARESIDDYDSSGYGRTFDYWGQGTLVTVSS

SEQ ID NO: 1732 - protein, 108 aa, Artificial Sequence
  Description of Artificial Sequence: Synthetic light chain variable region amino acid sequence
SYELTQPPSVSVSPGQTASIPCSGDKVGKTYVYWYQQTPGQSPGLVIYQDTKRPSGIPERFSGSSSGNTATLTISGTQTMDEADYYCQAWDTSTASYVFGTGTKLTVL

SEQ ID NO: 1733 - protein, 123 aa, Artificial Sequence
  Description of Artificial Sequence: Synthetic heavy chain variable region amino acid sequence
QVQLVQSGVEVKKPGESLKISCKGSGYSFTNYWIAWVRQMPGKGLEWMGIIYPGDSDTRYSPSFQGQVTISADKSISTAYVQWSSLKASDTAIYYCARGDILTNSGPDAFDIWGQGTMVTVSS

SEQ ID NO: 1734 - protein, 107 aa, Artificial Sequence
  Description of Artificial Sequence: Synthetic light chain variable region amino acid sequence
DIQMTQSPSSFSASTGDRVTITCRASQAISSYLAWFQQKPGKAPKLLIYAASTLQSGVPSRFSGSGSGTDFTLTISCLQSEDFATYYCQQYYSYPLTFGGGTKVEIK

SEQ ID NO: 1735 - protein, 124 aa, Artificial Sequence
  Description of Artificial Sequence: Synthetic heavy chain variable region amino acid sequence
EVQLVESGGGLVKPGGSLRLSCAASGFSFSSYYMNWVRQAPGKGLEWVSSISPSSSYTNYADSVKGRFTISRDNAKDSLYLQMNSLRAEDTAVYYCARDGLLGITIFGVVQDYWGQGTLVTVSS

SEQ ID NO: 1736 - protein, 110 aa, Artificial Sequence
  Description of Artificial Sequence: Synthetic light chain variable region amino acid sequence
QSVVTQPPSVSGAPGQRVTISCTGSSSNIGAGYDVHWYQQLPGTAPKLLIYGNTNRPSGVPDRFSASKSGTSASLAITGLQAEDEADYYCQSYDSSLSVVFGGGTKLTVL

SEQ ID NO: 1737 - protein, 120 aa, Artificial Sequence
  Description of Artificial Sequence: Synthetic heavy chain variable region amino acid sequence
QVQLVQSGGGVVQPGGSLRLSCAASGFTFSDYGMHWVRQAPGKGLEWVAVISDGGSNQYSADSVRGRFTISRDNSKNTLYLQMNSLRPEDTAVYYCAKARIAARAIFDYWGQGTLVTVSS

SEQ ID NO: 1738 - protein, 107 aa, Artificial Sequence
  Description of Artificial Sequence: Synthetic light chain variable region amino acid sequence
DIQLTQSPSSLSASVGERITITCQASRDVRIYLNWYQHKPGKAPKLLIYDASNLETGVPSRYSGSGSGTDFTFTISSLQPEDIATYFCQQYDLLPPTFGVGTKVEIK

SEQ ID NO: 1739 - protein, 130 aa, Artificial Sequence
  Description of Artificial Sequence: Synthetic heavy chain variable region amino acid sequence
QVQLQQWGAGLLKPSETLSLTCAVYGDSFSGYFWTWIRQPPGKGLEWIGEINLSGSTNYNPSLKSRVTILVDTSKNQFSLKLSSVTAADTAVYYCARGLHVSDDQDSSGYYFHPGSFDYWGQGTLVTVSS

SEQ ID NO: 1740 - protein, 113 aa, Artificial Sequence
  Description of Artificial Sequence: Synthetic light chain variable region amino acid sequence
DIRMTQSPDSLAVSLGERATINCKSSQSVLYSSNNKNYLAWYQQKPGQPPKLLINWASTRESGVPDRFSGSGSGTDFTLAISSLQAEDVAVYYCQQYYSTPLTFGGGTKVEIK

SEQ ID NO: 1741 - protein, 126 aa, Artificial Sequence
  Description of Artificial Sequence: Synthetic heavy chain variable region amino acid sequence
QVQLQESGPGLVKPSETLSLTCTVSGASVSSNNYYWSWIRQPPGKGLEWIGYIYYSGSTNYNASLKSRVTISVDTSKNQFSLKLSSVTAADTALYYCAGEHIFGVASPFEAPFDYWGQGTMVTVSS

SEQ ID NO: 1742 - protein, 108 aa, Artificial Sequence
  Description of Artificial Sequence: Synthetic light chain variable region amino acid sequence
SSELSQPPSVSVAPGKTARITCGGNNIGIKSVHWYQQKPGQAPVLVIYSDSDRPSGIPERFSGSNSGNTATLTITRVEAGDEADYYCQVWDSSSDHFVFGIGTKVTVL

SEQ ID NO: 1743 - protein, 124 aa, Artificial Sequence
  Description of Artificial Sequence: Synthetic heavy chain variable region amino acid sequence
EVQLVESGPGLVKPSETLSLTCTVSGGSITPYYWSWIRQPPGKGLEWIGNISYSGSTTYNPSLKSRVTISVDRSKDQFSLRLRSVTAADTAVYYCARVVTLVLGVSLNDAFDIWGQGTMVTVSS

SEQ ID NO: 1744 - protein, 107 aa, Artificial Sequence
  Description of Artificial Sequence: Synthetic light chain variable region amino acid sequence
DIQMTQSPSSLSASVGDRVTITCRASQSISRYLNWYQHKPGKAPILLIYAATTLESGVPPRFSGSGSGTDFSLTISSLQPEDFATYYCQQSYSVPLTFGGGTKLEIK

SEQ ID NO: 1745 - protein, 122 aa, Artificial Sequence
  Description of Artificial Sequence: Synthetic heavy chain variable region amino acid sequence
EVQLLESGGGLVQPGGSLRLSCAASGFIFSNYEMNWVRQAPGKGLEWISHITPTGNSIYYADSVKGRFTISRDNAKNAQYLQMHSLRPDDTAIYYCARGEDPIAATGGFDSWGQGTLVTVSS

SEQ ID NO: 1746 - protein, 107 aa, Artificial Sequence
  Description of Artificial Sequence: Synthetic light chain variable region amino acid sequence
EIVLTQSPSSLSASVGDRVTIPRRSSQNVDKFLHWYQQRPGKAPKLLIYAAFSLQSGVPSRFSGSGSGTDFTLTISSLQPEDFATYYCQQSYSTPFTFGQGTKVEIK

SEQ ID NO: 1747 - protein, 123 aa, Artificial Sequence
  Description of Artificial Sequence: Synthetic heavy chain variable region amino acid sequence
EVQLLESGGNMVQPGKSLRLSCAASGFTFSNYGMHWVRQAPGKGLEWVAVISKDGNNEHYADSVRARFTVSRDNSKNTLFLQMNSLRPEDTAVYYCAIGGLSGSYFGEYFQHWGRGTLVTVSS

SEQ ID NO: 1748 - protein, 107 aa, Artificial Sequence
  Description of Artificial Sequence: Synthetic light chain variable region amino acid sequence
DIQMTQSPSSMSASLGDRVTITCRASQGISTWLAWYQQKPGEAPKLLIYAAFGLQSGVPSRFSGSGSGTDFTLTINNLQPEDFATYYCQQAISFPFTFGGGTKVEIK

SEQ ID NO: 1749 - protein, 122 aa, Artificial Sequence
  Description of Artificial Sequence: Synthetic heavy chain variable region amino acid sequence
EVQLLESGGGLVKPGGSLRLSCAGSGFRFSDYYMTWIRQAPGKGLEWVSYISSSSTYTYYTDSVKGRFTVSRDNAKNSLYLQMNTLRAEDTAIYYCAISNRYDSRTFYYDYWGQGTLVTVSS

SEQ ID NO: 1750 - protein, 110 aa, Artificial Sequence
  Description of Artificial Sequence: Synthetic light chain variable region amino acid sequence
QSVLTQPPSVSGAPGQRVIISCTGSSSNIGAGYDVHWYQQFPGTAPKLLIYGNNNRPSGVPERFSGSKSGTSASLAITGLQADDEADYYCQSYDSLSEVVFGGGTKVTVL

SEQ ID NO: 1751 - protein, 117 aa, Artificial Sequence
  Description of Artificial Sequence: Synthetic heavy chain variable region amino acid sequence
EVQLQESGPGLVKPSETLSLTCTVSGGSLSGYYWSWIRQPPGKGLEWIGYIYHSGSTNYNPSLESRVTISVDTSKNQFSLKVNAVTAADTAVYYCAKVERLLRFDPWGQGTLVTVSS

SEQ ID NO: 1752 - protein, 110 aa, Artificial Sequence
  Description of Artificial Sequence: Synthetic light chain variable region amino acid sequence
QSVLIQPASVSGSPGQSITISCIGSSSDVGGYNYVSWYQHYPGKAPKLMIYDVSNRPSGVSNRFSGSKSGNTASLTISGLQAEDEADYYCSSYTSSTSYVFGTGTKVTVL

SEQ ID NO: 1753 - protein, 121 aa, Artificial Sequence
  Description of Artificial Sequence: Synthetic heavy chain variable region amino acid sequence
EVQLVESGGGLVKPGRSLRLSCTTSGFTFGDYAMSWFRQAPGKGLEWVGFIRSKPYGGATAYAASVRGRFTISNDDSKSIAYLQMESLKIEDTAVYYCARDYDDFFFYDYWGQGTLVTVSS

SEQ ID NO: 1754 - protein, 106 aa, Artificial Sequence
  Description of Artificial Sequence: Synthetic light chain variable region amino acid sequence
DIRMTQSPATLSVSPGERATLSCRASENIYSNLAWYQQKPGQAPRLLIYGASTRATGLPARFSGSGSGTEFTLTISSLQSEDFAVYYCQQYNNWPAFGGGTKVEIK

SEQ ID NO: 1755 - protein, 119 aa, Artificial Sequence
  Description of Artificial Sequence: Synthetic heavy chain variable region amino acid sequence
QVTLKESGAEVKKPGASVKVSCKASGYTFTGYYMHWVRQAPGQGLEWMGRINPNSGGTNYAQKFQGRVTMTRDTSISTAYMELSRLRSDDTAVYYCAREASRFGGFDYWGQGTLVTVSS

SEQ ID NO: 1756 - protein, 108 aa, Artificial Sequence
  Description of Artificial Sequence: Synthetic light chain variable region amino acid sequence
DIVLTQSPSSLSASVGDRVTITCQASQDISNYLNWYQQKPGKAPKLLIYDASNLETGVPSRFSGSGSGTDFTFTISSLQPEDIATYYCQQYDNLLGYTFGQGTKVEIK

SEQ ID NO: 1757 - protein, 127 aa, Artificial Sequence
  Description of Artificial Sequence: Synthetic heavy chain variable region amino acid sequence
QVQLVESGPGLVKPSQTLSLTCSVSGGSISSDDHYWSWIRQHPGKGLEWIGYIYYSGYTNYNPSLKSRVTISVDTSKNQFSLRLSSVTAADTAVYYCARETDITIFGVVPVGYFDYWGQGTLVTVSS

SEQ ID NO: 1758 - protein, 113 aa, Artificial Sequence
  Description of Artificial Sequence: Synthetic light chain variable region amino acid sequence
DIQVTQSPDSLAVSLGERATINCKSSQSILSSTNNKNFLAWYQQKPGQPPKLLLHWASTREFGVPDRFSGSGSGTEFTLTISSLQAEDVAVYYCQQYYTTPYTFGQGTKVEIK

SEQ ID NO: 1759 - protein, 121 aa, Artificial Sequence
  Description of Artificial Sequence: Synthetic heavy chain variable region amino acid sequence
EVQLLESGPGLVKPSETLSLTCTVSGGSVSSGGYYYTWIRQPPGKGLEWIGYAFYSGDTNYNPSLKSRVTISVDTSKNQFSLKLTSVTAADTAVYYCASTYTFGASGFDFWGQGTLVTVSS

SEQ ID NO: 1760 - protein, 107 aa, Artificial Sequence
  Description of Artificial Sequence: Synthetic light chain variable region amino acid sequence
DIVMTQSPSFMSASVGDRVTITCRASQGISNWLLWYQQKPGKAPKLLIYAASSLQSGVPSRFSGSRSGTDFTLTISSLQPEDFAIYYCQQANSFPLTFGQGTRLEIK

SEQ ID NO: 1761 - protein, 121 aa, Artificial Sequence
  Description of Artificial Sequence: Synthetic heavy chain variable region amino acid sequence
EVQLVESGPGLVKPSQTLSLTCTVSGGSINIGGYYWSWIRQHPEKGLEWIGYIYYSGTTYYNPSLESRVTISIDTSKNQFSLNLSSVTAADTAVYYCASVDQIGATRFDYWGQGTLVTVSS

SEQ ID NO: 1762 - protein, 112 aa, Artificial Sequence
  Description of Artificial Sequence: Synthetic light chain variable region amino acid sequence
QPVLTQPRSVSGSPGQSVTLSCTGTSSDVGTYNYVSWYQHHPGKAPKLIIYDVNKRPSGVPDRFSGSKSGNTASLTISGLQAEDEADYYCCSYAGSYTLNYVFGTGTKLTVL

SEQ ID NO: 1763 - protein, 118 aa, Artificial Sequence
  Description of Artificial Sequence: Synthetic heavy chain variable region amino acid sequence
QVQLVQSGDEVKKPGESLKISCKGSEHTFTNYWIAWVRQMPGKGLECMGVIWPDDSDTKYSPSFQGQVTISADKSINTAYLHLSSLRASDTAMYYCATSKFRTGFDFWGQGTLVTVSS

SEQ ID NO: 1764 - protein, 111 aa, Artificial Sequence
  Description of Artificial Sequence: Synthetic light chain variable region amino acid sequence
NFMLTQPHSVSESPGKTVIISCTRSSGNIASNYVQWYQQRPGSSPTTVVYEDNQRPSGVPDRFSGSIDSSSNSASLTISGLKTEDEADYYCQSYDSSNPWVFGGGTKLTVL

SEQ ID NO: 1765 - protein, 123 aa, Artificial Sequence
  Description of Artificial Sequence: Synthetic heavy chain variable region amino acid sequence
QVQLVESGAEVKKPGASVKVSCKASGYSFTSYYMHWVRQAPGQGLEWMGVISTNGGTASYSQNFRGRVTLTRDTSTSTAYMELSSLTSEDTAVYYCVREGYCNGGSCSYFDSWGQGTLVTVSS

SEQ ID NO: 1766 - protein, 110 aa, Artificial Sequence
  Description of Artificial Sequence: Synthetic light chain variable region amino acid sequence
QSVLTQPPSVSGAPGQRVSISCTGSSSNIGAGYDVHWYQQLPGTAPKVLIYGNNYRPSGVPDRFSGSKSGTSASLAITGLQTEDEADYYCQSYDSRLSVVFGGGTKLTVL

SEQ ID NO: 1767 - protein, 121 aa, Artificial Sequence
  Description of Artificial Sequence: Synthetic heavy chain variable region amino acid sequence
EVQLLESGGGVVQPGRSLRLSCAASELSFRNYGMHWVRQAPGKGLEWVAVISYDGNDKYYADSVKGRFTISRDNSKKTLYLQMDSLRAEDTAVYYCAKEGAYCGGDCFSSWGQGTLVTVSS

SEQ ID NO: 1768 - protein, 103 aa, Artificial Sequence
  Description of Artificial Sequence: Synthetic light chain variable region amino acid sequence
GIQLTQSPSSLSASVGDRVTITCRASQSSSSYLNWYQQKPGKAPKLLIYAASSLQSGVPSRFSGSGSGTDFTLTISSLQPEDFATYYCQQSYSFGGGTKVEIK

SEQ ID NO: 1769 - protein, 120 aa, Artificial Sequence
  Description of Artificial Sequence: Synthetic heavy chain variable region amino acid sequence
EVQLVESGGGLVKPGGSLRLSCAASGFTFSDYSMNWVRQAPGKGLEWVSSTSSGSTYIYYADSVKGRFTISRDNGKNSLYLQMNSLRAEDTAVYYCARAFRLGYDALDIWGQGTMVTVSS

SEQ ID NO: 1770 - protein, 107 aa, Artificial Sequence
  Description of Artificial Sequence: Synthetic light chain variable region amino acid sequence
DIRMTQSPSSLSASVGDRVTIICRASQSISNYLNWYQQKPGKAPKLLIYVASNLQSGVPSRFSGSGSGTDFTLTISSLQPEDFATYYCQQTYSPPPTFGGGTKLEIK

SEQ ID NO: 1771 - protein, 125 aa, Artificial Sequence
  Description of Artificial Sequence: Synthetic heavy chain variable region amino acid sequence
EVQLQESGPGLVKPSGTLSLTCAVAGGFISSGNWWSWIRQPPGKGLEWIGEVYHSGRTSYNPSLKSRVTISVDNSKNQFSLKMSSVTAADTAVYYCARVESYSSSGYYIAYFDNWGQGNLVTVSS

SEQ ID NO: 1772 - protein, 107 aa, Artificial Sequence
  Description of Artificial Sequence: Synthetic light chain variable region amino acid sequence
DIVLTQSPSSLSASVGDRVTITCRASQSISRYLSWYQQKPGKAPKLLIYAAFSLQTGVPSRFSGSGSGTDFTLTISSFQTEDSATYYCQQSYSAPVTFGGGTKVEIK

SEQ ID NO: 1773 - protein, 122 aa, Artificial Sequence
  Description of Artificial Sequence: Synthetic heavy chain variable region amino acid sequence
QVQLQQWGPGLVKPSETLSLSCAVSGGSLRGHFWSWIRQPPGKGLEWIGEINHGGRTNFNPSLKSRLTISEDSSKNQFSLKLSSVTAADTAVYYCARRWGYDSSGYYFFDYWGQGTLVTVSS

SEQ ID NO: 1774 - protein, 106 aa, Artificial Sequence
  Description of Artificial Sequence: Synthetic light chain variable region amino acid sequence
EIQMTQSPATLSVSPGERATLSCRASQTLGFNLAWYQQKPGQSPRLLIYGASTRATGIPARFSGSGAGTEFTLTISSLQSEDFAVYFCQQYSNYYTFGQGTKVEIK

SEQ ID NO: 1775 - protein, 128 aa, Artificial Sequence
  Description of Artificial Sequence: Synthetic heavy chain variable region amino acid sequence
EVQLVQSGAEVKKPGSSVKVSCKASGGTFSRNAISWVRQAPGQGLEWMGGIIPIFGAANYPQKFQGRVTITADKSTSTAYMELSSLRSEDTALYYCARTMGEMTTTPVSIYYYGMDVWGQGTTVTVSS

SEQ ID NO: 1776 - protein, 111 aa, Artificial Sequence
  Description of Artificial Sequence: Synthetic light chain variable region amino acid sequence
QSVLTQPPSVSAAPGQKVTISCSGSSSNIGINYVSWYQQLPGTAPKLLIYDNNKRPSGIPDRFSGSKSGTSATLGITGLQTGDEADYYCGTWDSSLSAGYVFGSGTKLTVL

SEQ ID NO: 1777 - protein, 123 aa, Artificial Sequence
  Description of Artificial Sequence: Synthetic heavy chain variable region amino acid sequence
QVQLVQSGAEVKKAGESLKISCKGPRHSFTSYWIGWVRQMPGKGLEWMASIYPGDSDSRYSPSFEGQVTISADKSIDTAFLQWSSLKASDTAMYFCARYVGAVPGGNWYFDLWGRGTLVTVSS

SEQ ID NO: 1778 - protein, 109 aa, Artificial Sequence
  Description of Artificial Sequence: Synthetic light chain variable region amino acid sequence
SYELIQLPSVSVSPGQTARITCSGDALPKKYAYWYQQKSGQAPVLVIYDDNKRPSGIPARFSGSSSGTMATLTISGAQVEDEGDYYCYSTDSTGDHRGVFGGGTKLTVL

SEQ ID NO: 1779 - protein, 122 aa, Artificial Sequence
  Description of Artificial Sequence: Synthetic heavy chain variable region amino acid sequence
EVQLVQSGDEVKKPGASVKVSCKASGYPFSTYGISWVRQAPGQGLEWMGWIGVYTGGTNYAQKFQGRVTLTTDTSTSTAYMELRSLRSDDTAVYYCARGTGSYMTATYFDYWGQGTLVTVSS

SEQ ID NO: 1780 - protein, 107 aa, Artificial Sequence
  Description of Artificial Sequence: Synthetic light chain variable region amino acid sequence
SYELTQPPSVSVAPGQTARITCGGNNIGSKAVHWYQQKPGQAPVLVVYDDYDRPSGIPERFSGSNSGNTATLTISRVEAGDEADYYCQVWDSSSDYVFGTGTKLTVL

SEQ ID NO: 1781 - protein, 126 aa, Artificial Sequence
  Description of Artificial Sequence: Synthetic heavy chain variable region amino acid sequence
QVTLKESGPALVKPTQTLTLTCTFSGFSLSTSRMCVSWIRQPPGKALEWLARIDWDGDIYYSTSLRTRLTISKDTSKNQVVLTMTNMDPVDTATYYCARTSIYATGGYYLYYSDYWGQGTLVTVSS

SEQ ID NO: 1782 - protein, 107 aa, Artificial Sequence
  Description of Artificial Sequence: Synthetic light chain variable region amino acid sequence
EIVMTQSPSSLSASVGDRVTITCRASQSIASYVNWFQQKPGKAPKLLIYAASNVHSGVPSRFSGSGSGTGFTLTISSLQPEDSAIYYCQQSYTTPWTFGQGTKLEIK

SEQ ID NO: 1783 - protein, 125 aa, Artificial Sequence
  Description of Artificial Sequence: Synthetic heavy chain variable region amino acid sequence
EVQLVESGGGVVQPGGSLRLSCAASGFTFRTYGMHWVRQAPGKGLEWVAVISYDGSNKYYADSLMGRFTISRDNSKNTLYLQMNSLRAEDTAVYYCAKCFVPGSGGWYEYYFDYWGQGTLVTVSS

SEQ ID NO: 1784 - protein, 111 aa, Artificial Sequence
  Description of Artificial Sequence: Synthetic light chain variable region amino acid sequence
QSVLTQPPSASGSPGQSVTISCTGTSSDVGGYNYVSWYQQHPGKAPKLMIYEVSKRPSGVPDRFSGSKSGNTASLTVSGLQAEDEADYYCSSYAGINNSVLFGGGTKLTVL

SEQ ID NO: 1785 - protein, 120 aa, Artificial Sequence
  Description of Artificial Sequence: Synthetic heavy chain variable region amino acid sequence
QVQLVQSGAEVKKPGESLRISCKGSGYSFSSHWIGWVRQKPGKGLEWMGIIYPGDSDTRYSPSFQGHVTISADKSISTAYLRWSSLKASDTAIYYCAKRMVGDYYGMNLWGQGTTVTVSS

SEQ ID NO: 1786 - protein, 108 aa, Artificial Sequence
  Description of Artificial Sequence: Synthetic light chain variable region amino acid sequence
EIVMTQSPSSLSASVGDRVTITCQASQDISNRLNWYQQKPGKAPKLLIYDASNLETGVPSRFSGSGSGTDFTFTISSLQPEDIATYFCQQYDYLLWFTFGPGTKVDIK

SEQ ID NO: 1787 - protein, 120 aa, Artificial Sequence
  Description of Artificial Sequence: Synthetic heavy chain variable region amino acid sequence
QVQLVQSGAEVKKPGESLKISCQASGYSFTTYWIGWVRQTPGKGLEWMGIIYPGDSDTRYTPSFQGQVTISADKSISTAYLHWSSLKASDTAMYYCARLSGGYTFGFDYWGLGTLVTVSS

SEQ ID NO: 1788 - protein, 110 aa, Artificial Sequence
  Description of Artificial Sequence: Synthetic light chain variable region amino acid sequence
NFMLTQPHSVSESPGKTVTISCTRSSGNIARYYVQWYQQRPGRAPTTVIYEDDQRPSGVPDRFSGSIDRSSNSASLTISGLKTEDEADYYCQSYDASNYVFATGTKVTVL

SEQ ID NO: 1789 - protein, 127 aa, Artificial Sequence
  Description of Artificial Sequence: Synthetic heavy chain variable region amino acid sequence
EVQLLESGSGLVKPLQTLSLTCAVSGGSISSGGYSWSWIRQPPGKGLEWIGYIYPSGSTYYNPSLKSRVTMSIDRSKNQFSLRLTSVTAADTAVYYCARGDGNDFWSADSSHAFAIWGQGTMVTVSS

SEQ ID NO: 1790 - protein, 108 aa, Artificial Sequence
  Description of Artificial Sequence: Synthetic light chain variable region amino acid sequence
EIVMTQSPGTLSLSPGERATLSCRASQIVGNSYLAWYQQKPGQAPRLLIYGASSRATGIPERFSGSGSGTDFTLTISRLEPEDFAVYHCQQYGSSPWTFGQGTKVEIK

SEQ ID NO: 1791 - protein, 126 aa, Artificial Sequence
  Description of Artificial Sequence: Synthetic heavy chain variable region amino acid sequence
QVQLVESGGGVVQPGRSLRLSCAASGFTFSSYGMHWVRQAPGKGLEWVSVIWFDGSKKYYEDSVKGRFTISRDNSKNTLYLEMNSLRAEDTAVYYCAREAPVRLGELSLYGYFDYWGQGTLVTVSS

SEQ ID NO: 1792 - protein, 107 aa, Artificial Sequence
  Description of Artificial Sequence: Synthetic light chain variable region amino acid sequence
DIQMTQSPSTLSASVGDRVTITCRASQSFSSWLAWYQQKPGKAPKLLIYDASTLESGVPSRFSGSGSGTEFTLTISSLQPDDFATYYCQQYNSYSWTFGQGTKLEIK

SEQ ID NO: 1793 - protein, 121 aa, Artificial Sequence
  Description of Artificial Sequence: Synthetic heavy chain variable region amino acid sequence
QVQLQESGPGLVKPSQTLSLTCTVSGGSMISGDFYWSWIRQPPGKGLEWIGYIYYSGTTYYSPSLKSRVSMSIDTSKSQFSLKLSSVTAADTAVYYCARKYSYGEKAYHYWGQGTLVTVSS

SEQ ID NO: 1794 - protein, 108 aa, Artificial Sequence
  Description of Artificial Sequence: Synthetic light chain variable region amino acid sequence
EIVLTQSPGTLSLSPGERATLSCRASQTVGNNYLAWYQQKPGQAPRLLIYGASSRATGIPDRFSGSGSGTDFTLTISRLESEDFAVYHCHQYGTSPQTFGQGTKVEIK

SEQ ID NO: 1795 - protein, 131 aa, Artificial Sequence
  Description of Artificial Sequence: Synthetic heavy chain variable region amino acid sequence
EVQLVESGSGLVKPSQTLSLTCSVSGGSISSGGYSWSWIRQPPGKGLEWIGFIYNTGSTYSNPSLKSRLTLSVDRSNNRFSLKLNSVTAADTGVYFCARSGNVRQCDATGHCSTNYYFEYWGLGTLVTVSS

SEQ ID NO: 1796 - protein, 108 aa, Artificial Sequence
  Description of Artificial Sequence: Synthetic light chain variable region amino acid sequence
EIVMTQSPATLSVSPGERATLSCRASQSVSSNLAWYQQKPGQAPRLLIYGASTRATGIPARFSGSGSGTEFTLTISSLQSEDFAVYYCQQHDDWPPLTFGGGTKVEIK

SEQ ID NO: 1797 - protein, 126 aa, Artificial Sequence
  Description of Artificial Sequence: Synthetic heavy chain variable region amino acid sequence
EVQLLESGGGVVQPGRSLRLSCAASGLSFNSFGMHWVRQAPGKGLEWVAVIAYDGSNKYYADSVKGRFSISRDNSKNTLYLQMDSLRAEDTAVYYCAKAEAPNFSWSGYLSAFDIWGQGTTVTVSS

SEQ ID NO: 1798 - protein, 110 aa, Artificial Sequence
  Description of Artificial Sequence: Synthetic light chain variable region amino acid sequence
QPVLTQPASVSGSPGQSVTVSCTGTSDDVGDYNYVSWYQQHPGKAPKLLIFEVSDRPSGVSTRFSGSKSGNTASLTISGLQTEDEADYYCSSYTSRNLYVFGTGTKVTVL

SEQ ID NO: 1799 - protein, 122 aa, Artificial Sequence
  Description of Artificial Sequence: Synthetic heavy chain variable region amino acid sequence
EVQLVESGGGLVQPGRSLRLSCAASGFTFGDYAMHWVRQAPGKGLEWVSGITWNSGRVVYADSVKGRFTISRDNAKNSLYLQINSLRAEDTALYYCVKGSCNGGICYSADYWGQGTLVTVSS

SEQ ID NO: 1800 - protein, 110 aa, Artificial Sequence
  Description of Artificial Sequence: Synthetic light chain variable region amino acid sequence
NFMLTQPHSVSESPGKTVTISCTRSSGSIARNFVHWYQQRPGSSPTTVIYEDNQRPSGVPGRFSGSIDSSSNSASLTISGLRSEDEADYYCQSYDSDNWVFGGGTKLTVL

SEQ ID NO: 1801 - protein, 125 aa, Artificial Sequence
  Description of Artificial Sequence: Synthetic heavy chain variable region amino acid sequence
EVQLLESGGGLVEPGTSLRLSCEASGFTFSDYYMSWIRQAPGKGPEWVADISSRGVVTYYADSVKGRFTISRDNAKNSLYLQLNSLGAEDTAVYYCARLREVTYIMPTIDYFDYWGQGTLVTVSS

SEQ ID NO: 1802 - protein, 108 aa, Artificial Sequence
  Description of Artificial Sequence: Synthetic light chain variable region amino acid sequence
SYELTQPPSVSVSPGQTARITCSGDAFVKKYAYWYHQKSGQAPVVVIYEDTKRPSGIPERFSGSSSGTTATLTISGAQVEDEGDYYCYSRDFSGDHGVFGGGTKLTVL

SEQ ID NO: 1803 - protein, 125 aa, Artificial Sequence
  Description of Artificial Sequence: Synthetic heavy chain variable region amino acid sequence
QVQLVESGGGQGQPGRSLRLSCAASGFTFDDYAMHWVRQVPGKGLEWVSGINWNSGYIGYADSVKGRFTISRDNAKNSLYLQMNSLRAEDTALYYCAKANNPIDSSGYNRGFDTWGQGTLVTVSS

SEQ ID NO: 1804 - protein, 110 aa, Artificial Sequence
  Description of Artificial Sequence: Synthetic light chain variable region amino acid sequence
QSALTQPRSVSGSPGQSVTISCTGTSSDVGGYNYVSWYQQHPGKAPKLMIYDVNKRPSGVPDRFSGSKSDNTASLTISGLQAEDESDYFCCSYAGTYTWVFGGGTKVTVL

SEQ ID NO: 1805 - protein, 125 aa, Artificial Sequence
  Description of Artificial Sequence: Synthetic heavy chain variable region amino acid sequence
QVQLVQSGAEVRKPGASVKVSCKAFGYTFTNFAISWVRQAPGQGLEWMGWIGPYNGDTDYEQKFQGRVTMTADTSSSTVFMELRSLRFDDTAVYYCARGKGSTIPLGYYIGMDVWGQGTTVTVSS

SEQ ID NO: 1806 - protein, 107 aa, Artificial Sequence
  Description of Artificial Sequence: Synthetic light chain variable region amino acid sequence
ETTLTQSPSSLSASVGDRVTMTCRASQGISNYLAWYQQKPGKPPKLLIYLASSLQSGVPSRFSGSGSGTDFTLTISSLQPEDVATYYCQKYNSAPLTFGGGTKLEIK

SEQ ID NO: 1807 - protein, 120 aa, Artificial Sequence
  Description of Artificial Sequence: Synthetic heavy chain variable region amino acid sequence
QVQLVQSGDEVKKPGASVKVSCKSSGYTFTHFGVSWVRQAPGQGLEWMGWISGYNGNTNYAQKLQGRVTMTTDTSTTTAYMELTSLRSDDTAVYYCARDSPAGTVTLDFWGQGTTVTVSS

SEQ ID NO: 1808 - protein, 114 aa, Artificial Sequence
  Description of Artificial Sequence: Synthetic light chain variable region amino acid sequence
DIVMTQSPLSLPVTLGQPASISCRSSQSLVYSDGNTYLNWFQQRPGQSPRRLIYKVSNRDSGVPDRFSGSGSGTDFTLKISRVEAEDVGVYYCMHGTHWPPEYTFGQGTKVEIK

SEQ ID NO: 1809 - protein, 131 aa, Artificial Sequence
  Description of Artificial Sequence: Synthetic heavy chain variable region amino acid sequence
EVQLLESGGGVVQPGRSLRLSCAASGFTFSSSGMHWVRQAPGKGLEWVAIISSDGSKHYYADSVKGRFTISRDNSKNTLYLEMNSLRAEDSAVYYCAREGVWSGFFVDTGTDFRHHGMDVWGQGTTVTVSS

SEQ ID NO: 1810 - protein, 108 aa, Artificial Sequence
  Description of Artificial Sequence: Synthetic light chain variable region amino acid sequence
SYELTQPPSVSVSPGQTARITCSGDALPKKFAFWYQQKSGQAPLLVIHEDNKRPSGIPERFSGSSSGTLATLTISGAQVEDEADYYCYSIDTSANLGVFGGGTKLTVL

SEQ ID NO: 1811 - protein, 121 aa, Artificial Sequence
  Description of Artificial Sequence: Synthetic heavy chain variable region amino acid sequence
QVQLVQSGAEVKKPGASVKVSCQASGYTLTTYDINWVRQAPGQGLEWMGWMNANSGNTGYAQKFQGRVTMTRNISISTAYMELSSLGPEDTAVYYCARGFYKWNDWSFDYWGQGTLVTVSS

SEQ ID NO: 1812 - protein, 109 aa, Artificial Sequence
  Description of Artificial Sequence: Synthetic light chain variable region amino acid sequence
QSVLTQPPSVSVAPGQTARITCGGNNIGSKSVHWYQQKPGQAPVLVVYDDSDRPSGIPERFSGSNSGNTAPLTISRVEAGDEADYYCQVWDGDSAHHAVFGGGTQLTVL

SEQ ID NO: 1813 - protein, 121 aa, Artificial Sequence
  Description of Artificial Sequence: Synthetic heavy chain variable region amino acid sequence
QVQLVQSGAEVKKPGSSVKVSCKASGGTFSNYGISWVRQAPGQGLERLGGIIPIYGTANHAQNFQGRVTITADESTSTAYMELSSLRSEDTAVYYCARDGTFVRYYGMDVWGQGTTVTVSS

SEQ ID NO: 1814 - protein, 107 aa, Artificial Sequence
  Description of Artificial Sequence: Synthetic light chain variable region amino acid sequence
EIVLTQSPATLFLSPGERATLSCRASQSVSNYLAWFQQKPGQAPRLLIYDTSIRATGIPARFSGSGSGTDFTLTISSLEPEDFAFYYCQQRSNWPPTFGGGTKLEIK

SEQ ID NO: 1815 - protein, 121 aa, Artificial Sequence
  Description of Artificial Sequence: Synthetic heavy chain variable region amino acid sequence
QVQLVQSGGGLVKHGGSLRLSCAASGFTFSSYSMNWVRQAPGKGLEWASSISSSSSYIYYADSVKGRFTISRDNAKNSLYLQMNSLRAEDTAVYYCARTEYSSSSPIFDYWGQGTLVTVSS

SEQ ID NO: 1816 - protein, 111 aa, Artificial Sequence
  Description of Artificial Sequence: Synthetic light chain variable region amino acid sequence
QSVLTQPPSVSGAPGQRVTISCTGSSSNIGAGYDVHWYQQLPGTAPKLLTYGNSNRPSGVPDRFSGSKSGTSASLAITGLQAEDEADYYCQSYDSSLSGSVFGGGTKVTVL

SEQ ID NO: 1817 - protein, 133 aa, Artificial Sequence
  Description of Artificial Sequence: Synthetic heavy chain variable region amino acid sequence
EVQLQQWGAGLLKPSETLSLTCAVYGGSFSGYYWSWIRQPPGKGLEWIGEINHSGSTNYNPSLKSRVTISVDTSKNQFSLKLSSVTAADTAVYYCARGTRTIVYCDGDCYQPWAYHYYGMDVWGQGTTVTVSS

SEQ ID NO: 1818 - protein, 110 aa, Artificial Sequence
  Description of Artificial Sequence: Synthetic light chain variable region amino acid sequence
QSVVTQEPSVSAAPGQKVTISCSGGSSNIGNNYVSWYQHLPGTAPKLLIYDNDKRPSGIPDRFSGSKSGTSATLGITGLQTGDEADYYCGTWDSSLSAVVFGGGTKLTVL

SEQ ID NO: 1819 - protein, 129 aa, Artificial Sequence
  Description of Artificial Sequence: Synthetic heavy chain variable region amino acid sequence
QVQLVQSGAEVKKPGSSVKVSCQASGGTFSTHALSWVRQTPGHGLEWVGGVLPVFGATKYPRKFQGRVTITADKSTNTAYMELSSLRSDDTAVYYCARVVVHSTITTAKDFFSGVHDIWGQGTMVTVSS

SEQ ID NO: 1820 - protein, 108 aa, Artificial Sequence
  Description of Artificial Sequence: Synthetic light chain variable region amino acid sequence
DIRMTQSPSTLSASVGDRVTITCRASQTVSSWLAWYQQKPGKAPKLLIYQASSLESGVPSRFSGSGSGTEFTLTISGLQPDDFATYFCQHYNSYSPVTFGGGTKVEIK

SEQ ID NO: 1821 - protein, 115 aa, Artificial Sequence
  Description of Artificial Sequence: Synthetic heavy chain variable region amino acid sequence
QVQLVQSGAEVKKPGASVKVSCKASGYTFTDYYMHWVRQAPGQGLEWLAWINPYTGGTNYAQKFQGRVTLTRDTSVSTTYMEVTRLRSDDTAVYYCARGESFHHWGQGTLVTVSS

SEQ ID NO: 1822 - protein, 112 aa, Artificial Sequence
  Description of Artificial Sequence: Synthetic light chain variable region amino acid sequence
QSALTQPASVSGSPGQSITISCTGTSSDIGGYDYVSWYQQHPGKVPKLMIYEVSTRPSGVSIRFSGSKSGNTASLTISGLQAEDEADYYCSSYTRSTITSVVFGGGTKLTVL

SEQ ID NO: 1823 - protein, 135 aa, Artificial Sequence
  Description of Artificial Sequence: Synthetic heavy chain variable region amino acid sequence
RCTLQQWGAGRVKPSETLSLTCAVYRGPFSGYYWSWIRQPPGKGLEWIGEINLGETNPGGSTHYNPSLRSRLSMSIDTSKKQFSLRVNSVTAADTAVYYCTRGPVSRIYDTSGSYSLNYYGMDVWGQGTTVTVSS

SEQ ID NO: 1824 - protein, 107 aa, Artificial Sequence
  Description of Artificial Sequence: Synthetic light chain variable region amino acid sequence
DIRMTQSPSSLSASVGDRVTITCRASQGIRNDLGWYQQKPGRAPERLIYPASSLQGGVPSRFIASGSGTEFTLTISNLQPEDFATYYCLQHNSYPRTFGQGTKVEIK

SEQ ID NO: 1825 - protein, 126 aa, Artificial Sequence
  Description of Artificial Sequence: Synthetic heavy chain variable region amino acid sequence
QVQLQQWGAGLLKPSETLSLTCSVLGGSFSGYYWTWIRQPPGKGLEWIGEITHDGSSNYNPSLNSRVTISVDTSNYQFSLKMRSVTAADTAVYYCARSPDLTIFGGLYFYYGISVWGQGTTVTVSS

SEQ ID NO: 1826 - protein, 107 aa, Artificial Sequence
  Description of Artificial Sequence: Synthetic light chain variable region amino acid sequence
DIQMTQSPSSLSASMGDRVTITCRASQDISNYLAWYQQKPGKVPNLLIYAASTLQGGVPSRFSGSGSGTDFTLTISSLQPEDVAIYYCQKYKSAPRTFGQGTKVEIK

SEQ ID NO: 1827 - protein, 120 aa, Artificial Sequence
  Description of Artificial Sequence: Synthetic heavy chain variable region amino acid sequence
QVQLVQSGAEVKKPGESLKISCKASGYSFTSYWIAWVRQMPGKGLEWMGIIFPGDSDTRYSPSFQGQVTISADKSISTAYLQWSSLEASDTAMYYCAKSTTYYYYGLDVWGQGTTVTVSS

SEQ ID NO: 1828 - protein, 110 aa, Artificial Sequence
  Description of Artificial Sequence: Synthetic light chain variable region amino acid sequence
QPVLTQPASVSGSPGQSITISCTGTSSDVGGYDYVSWYQQYPGKAPKLMIYEVSNRPLGVSNRFSGSRSGYTASLTISGLQAEDETNYYCSSYTSSRTWVFGGGTKLTVL

SEQ ID NO: 1829 - protein, 126 aa, Artificial Sequence
  Description of Artificial Sequence: Synthetic heavy chain variable region amino acid sequence
EVQLLESGPALVKPTQTLTLTCTFSGFSLTTTRMSVSWIRQPPGKALEWLARIDWDDDKYYSTSLKTRLTISKDTSKNQVVLTMTNMDPVDTATYFCARVNVYAANGYYSYYLDYWGQGTLVTVSS

SEQ ID NO: 1830 - protein, 107 aa, Artificial Sequence
  Description of Artificial Sequence: Synthetic light chain variable region amino acid sequence
DIVMTQTPSSLSASVGDRVTITCRTSQSSSRYLNWYQKEPGKAPRLLIYLASALRSGVPSRFSGSGSGTDFTLTISSLQSEDFATYYCQQTYSIPWTFGQGTKVEIK

SEQ ID NO: 1831 - protein, 115 aa, Artificial Sequence
  Description of Artificial Sequence: Synthetic heavy chain variable region amino acid sequence
QVQLVQSGAELKKPGSSVRISCKVSGVTSDNYAITWVRQAPGQGLEWMGRVIPIFPVPQYAQKFQGRVTLSADKSTRTAYLELHSLRSEDTATYYCATHRPSDSWGQGTLVTVSS

SEQ ID NO: 1832 - protein, 107 aa, Artificial Sequence
  Description of Artificial Sequence: Synthetic light chain variable region amino acid sequence
DIRVTQSPSTLSASVGDRVTITCRASQNINSWLAWYQQKPGKAPKLLIFKASSLESGVPARFSGSGFGTEFTLTITSLQPDDFASYYCQQYDTYPYPFGQGTKVEIK

SEQ ID NO: 1833 - protein, 126 aa, Artificial Sequence
  Description of Artificial Sequence: Synthetic heavy chain variable region amino acid sequence
QVTLKESGGGLVQPGGSLRLSCAASGFTFSNYAMSWVRQAPGKGLEWVSAISHSDSRTFYADSVKGRFTISRDNSKNTLFLQMDSLRAHDTAVYYCANVDPSSVTYYGYYYGMDVWGQGTTVTVSS

SEQ ID NO: 1834 - protein, 110 aa, Artificial Sequence
  Description of Artificial Sequence: Synthetic light chain variable region amino acid sequence
QSVLTQPPSASGTPGQRVTISCSGSSSNIGKNFVYWYQQFPGTAPKRLIYRNNQRPSGVPDRFSGSRSGTSASLAISGLRSEDEADYYCATWDDSLSGWVFGGGTKLTVL

SEQ ID NO: 1835 - protein, 121 aa, Artificial Sequence
  Description of Artificial Sequence: Synthetic heavy chain variable region amino acid sequence
QVQLVQSGGGVVQPGRSLRLSCAASGFNFHNYAMHWVRQAPGKGLEWVAVISYDGGNKHYADSVKGRFTISRDNSKNTLYLQMNSLRPDDTAVYYCARGHSDWRGDYFDFWGQGTLVTVSS

SEQ ID NO: 1836 - protein, 108 aa, Artificial Sequence
  Description of Artificial Sequence: Synthetic light chain variable region amino acid sequence
DIQLTQSPATLSVSPGERAILSCRASQNVGTNLAWYQQKPGQAPRLLIYDASTRATGIPARFSGSGAGTDFTLTISGLQSEDFAVYYCQQYINWPPYTFGQGTKLEIK

SEQ ID NO: 1837 - protein, 127 aa, Artificial Sequence
  Description of Artificial Sequence: Synthetic heavy chain variable region amino acid sequence
QVQLQQSGPRLVKPSHTLSLTCVISGDSVSSGSAAWSWIRQSPSRGLEWLGRTYYRSKWYYDYAVSVKGRIIIQPDTSKNQFSLQLNSVSPEDTAVYYCARDPDSGNYFHYYGMDVWGQGTTVTVSS

SEQ ID NO: 1838 - protein, 108 aa, Artificial Sequence
  Description of Artificial Sequence: Synthetic light chain variable region amino acid sequence
DIVMTQSPATLSLSPGERATLSCRASQSVDVYFAWYQQKPGQAPRLLIYDASKRASGVPARFSGSASGTDFTLTISSLEPEDFAVYYCQQRAKWPPYTFGQGTKLEIK

SEQ ID NO: 1839 - protein, 125 aa, Artificial Sequence
  Description of Artificial Sequence: Synthetic heavy chain variable region amino acid sequence
EVQLVESGGGLVKPGGSLRLSCAASGFTFSSYSMNWVRQAPGKGLEWVSSISAGSSYTDYAESVKGRFTISRDNAKNSLYLKMNSLRAEDTAVYYCARDPGYCSSNSCTVAMDVWGQGTTVTVSS

SEQ ID NO: 1840 - protein, 109 aa, Artificial Sequence
  Description of Artificial Sequence: Synthetic light chain variable region amino acid sequence
SYELTQPPSVSGAPGQRVTISCTGSSSNIGAGYDVHWYQQLPGTAPKLLIYGNNNRPSGVPDRFSGSKSGTSASLAITGLQAEDEADYYCQSYDRTLVIFGGGTKLTVL

SEQ ID NO: 1841 - protein, 123 aa, Artificial Sequence
  Description of Artificial Sequence: Synthetic heavy chain variable region amino acid sequence
EVQLLESGPTLVKPTQTLTLTCTFSGFSLSTFGVGVGWIRQPPGKALECLALIYWDDDKRYSPSLKSRLTITRDTSKNQVVLTMTNMDPVDTATYYCAHRRSSTVTTGFFDYWGRGTLVTVSS

SEQ ID NO: 1842 - protein, 111 aa, Artificial Sequence
  Description of Artificial Sequence: Synthetic light chain variable region amino acid sequence
QPVLTQPPSVSGAPGQRVTVSCTGNSSNIGAGHGAHWYQQLPGTAPKLLIYGSTDRPSGVPDRFFGSQSGTSASLVITELRAEDEADYYCQSFDSSLSIWVFGGGTKLTVL

SEQ ID NO: 1843 - protein, 121 aa, Artificial Sequence
  Description of Artificial Sequence: Synthetic heavy chain variable region amino acid sequence
EVQLLESGGGLVKPGGSLRLSCGASGFTFSTSSFNWVRQAPGKGLEWVSSISSTSSYVFYADSVKGRFTVSRDNAQNSLYLQMNSLRAEDTAVYYCARARGVGATIGFDYWGQGTLVTVSS

SEQ ID NO: 1844 - protein, 112 aa, Artificial Sequence
  Description of Artificial Sequence: Synthetic light chain variable region amino acid sequence
DIVMTQSPLSLPVTPGEPASISCRSSQSLLHSNGYNYLDWYLQKPGQSPQLLIYLGSNRASGVPDRFSGSGSGTDFTLKISRVEAEDVGVYYCMQALQTPYTFGQGTKVEIK

SEQ ID NO: 1845 - protein, 128 aa, Artificial Sequence
  Description of Artificial Sequence: Synthetic heavy chain variable region amino acid sequence
QVQLVQSGAEVKKPGASVKVSCEASGYTFTDSYIHWVRQAPGQGLEWMGWINPNSGGTNYAQKFQGRVTMTRDTSTSTAFIELSRLRSDDTAVYYSARGVRQQWLVNTGDPDYYFDFWGQGTLVTVSS

SEQ ID NO: 1846 - protein, 106 aa, Artificial Sequence
  Description of Artificial Sequence: Synthetic light chain variable region amino acid sequence
SYVLTQPPSVSVSPGQTASITCSGDKLGDKYSCWYQQKPGQSPVLVIYQDYKRPSGIPERFSGSNSGNTATLTISGTQAMDEADYYCQAWDRNAGVFGTGTKLTVL

SEQ ID NO: 1847 - protein, 122 aa, Artificial Sequence
  Description of Artificial Sequence: Synthetic heavy chain variable region amino acid sequence
QVQLVQSGAEVKKPGESLKISCKGPGYSFTTYWIGWVRQMPGKGLEWMGIIYPGDSDTKYSPSFQGQVTITADKSIATAYLQWSRLKASDTAVYYCATVVTYADNIRWFDSWGQGTLVTVSS

SEQ ID NO: 1848 - protein, 110 aa, Artificial Sequence
  Description of Artificial Sequence: Synthetic light chain variable region amino acid sequence
QSALTQPASVSGSPGQSITISCTGTSGDVGGYKFVSWYQHHPGKAPKLVIYDVANRPSGVSDRFSGSKSGTTASLTISGLQAEDEADYYCSSYTSSSTYVFGTGTKVTAL

SEQ ID NO: 1849 - protein, 123 aa, Artificial Sequence
  Description of Artificial Sequence: Synthetic heavy chain variable region amino acid sequence
EVQLVESGGGLVQPGGSLRLSCAASGFTVNTNYMSWVRQAPGKGLEWVSIIYSSGSTSYADSVKGRFTISRDNSENTLYLQMHTLRAEDTAVYYCVRERTPFYYVSSGYWDSWGQGTLVTVSS

SEQ ID NO: 1850 - protein, 107 aa, Artificial Sequence
  Description of Artificial Sequence: Synthetic light chain variable region amino acid sequence
EIVLTQSPGTLSLSPGERATLSCRASQSVDSSYLAWYQQKPGQAPRLLIFGASSRATGIPDRFSGSGSGTDFTLTISRLEPEDFAVYYCQQYGFSYTFGQGTKVEIK

SEQ ID NO: 1851 - protein, 130 aa, Artificial Sequence
  Description of Artificial Sequence: Synthetic heavy chain variable region amino acid sequence
EVQLVESGGGVVQPGRSLRLSCAVSGFTFSTYGMHWVRQTPGRGLEWVAVISYDGNHKYYADSVMGRFTISRDNSKDTLYLQVNSLRPEDSAVYYCAKDRIHCPNGVCYVHSSFYGLDVWGQGTTVTVSS

SEQ ID NO: 1852 - protein, 110 aa, Artificial Sequence
  Description of Artificial Sequence: Synthetic light chain variable region amino acid sequence
QTVVTQEPSLTVSPGGTVTLTCGSSTGAVTSGHYPYWLQQKPGQAPRTLIYDTTNKDSWTPARFSGSLLGGKAALTLSGAQPEDEAQYYCLLSFNGPYWVFGGGTKVTVL

SEQ ID NO: 1853 - protein, 130 aa, Artificial Sequence
  Description of Artificial Sequence: Synthetic heavy chain variable region amino acid sequence
EVQLSESAGGVVQPGGSLRLTCAASGFSFSTNGMHWVRQAPGKGLEWVAFIRYDGSKKYYAESVKGRFTISREDSNNTLYLQMNSLRPEDTAVYYCAKEDCSGGTCYHERNYYYYGMDVWGQGTTVTVSS

SEQ ID NO: 1854 - protein, 106 aa, Artificial Sequence
  Description of Artificial Sequence: Synthetic light chain variable region amino acid sequence
QPVLTQPPSLPVSPGQTASITCSGDKLEYKYACWYQHKPGQSPVLVIYQDNKRPSGIPERFSGSNSGNTATLTISGTQPMDEADYYCQAWDSSTVVFGGGTKVTVL

SEQ ID NO: 1855 - protein, 124 aa, Artificial Sequence
  Description of Artificial Sequence: Synthetic heavy chain variable region amino acid sequence
EVQLVESGGGLVQPGGSLRLSCADSDFTFSTYSMNWVRQAPGKGLEWISYITGRSSAIYYADSVKGRFTISRDNAKNSLFLQMNSLRAEDTAVYYCTTFMAGYSFGHGDAFDIWGQGTTVTVSS

SEQ ID NO: 1856 - protein, 110 aa, Artificial Sequence
  Description of Artificial Sequence: Synthetic light chain variable region amino acid sequence
SYELTQPPSVSVAPGQTARITCGGNNIGSKSVHWYQQKPGQAPVLVVYDDSDRPSGIPERFSGSNSGNTATLTISRVEAGDEADYYCQVWNSNSDHPHWVFGGGTQLTVL

SEQ ID NO: 1857 - protein, 119 aa, Artificial Sequence
  Description of Artificial Sequence: Synthetic heavy chain variable region amino acid sequence
EVQLVESGGGLVKPGGSLRLSCAASGFTSSGYNMNWVRQAPGKGLEWVSSISGSSSYIHYADSVKGRFTISRDNAKNSLYLQMNSLRAEDTAVYYCATVGALPGHFDNWGQGTLVTVSS

SEQ ID NO: 1858 - protein, 110 aa, Artificial Sequence
  Description of Artificial Sequence: Synthetic light chain variable region amino acid sequence
QAVVTQEPSVSGAPGQRVTISCTGSSSNIGAGYDVHWYQQLPGTAPKLLIYDNTNRPSGVPDRFSGSKSGTSASLAITGLQAEDEADYYCQSYDSRLTYVFGTGTKVTVL

SEQ ID NO: 1859 - protein, 129 aa, Artificial Sequence
  Description of Artificial Sequence: Synthetic heavy chain variable region amino acid sequence
QVQLVQSGPAVKKPGASVKVSCKASGYIFTSYGVSWVRQAPGQGLEWMGWISGYNGNTDYAQKFQGRVTLTVDSSTGTVYMDLRSLRSDDTAIYYCARAPPLPGQVYDGAGSYLLHGYWGQGTLVTVSS

SEQ ID NO: 1860 - protein, 112 aa, Artificial Sequence
  Description of Artificial Sequence: Synthetic light chain variable region amino acid sequence
DIVMTQSPLSLPVTPGEPASISCRSSQSLLHSNGYNYLDWYLQKPGQSPQLLIYLGSNRASGVPDRFSGSGSGTDFTLKISRVEAEDVGVYYCMQALQTPRTFGQGTKVEIK

SEQ ID NO: 1861 - protein, 124 aa, Artificial Sequence
  Description of Artificial Sequence: Synthetic heavy chain variable region amino acid sequence
EVQLLESGGGLVKPGGSLRLSCAASGFTFSSYAMHWVRQPPGKGLEWVSSISASSSFINYADSVKGRFTISRDGARNSLYLQMNSLRAEDTAVYYCVREDYDSSGYGLHWFDPWGQGTTVTVSS

SEQ ID NO: 1862 - protein, 111 aa, Artificial Sequence
  Description of Artificial Sequence: Synthetic light chain variable region amino acid sequence
SYVLTQPPSVSGAPGQRVTISCTGSSSNIGAGYDVHWYQQFPGTAPKLLMYGNTNRPSGVPDRFSGSKSGTSASLAITGLQAEDEADYYCQSYDRSLSGWVFGGGTKLTVL

SEQ ID NO: 1863 - protein, 123 aa, Artificial Sequence
  Description of Artificial Sequence: Synthetic heavy chain variable region amino acid sequence
EVQLVESGGGLVQPGGSLRLSCAASGFTFSKYAMNWVRQAPGKGLEWVSSISDSGDSRYYADSVKGRFTISRDSSKNTLNLQMNSLRAEDTAVYYCAKAGWELFSPQGAFDLWGQGTMVTVSS

SEQ ID NO: 1864 - protein, 108 aa, Artificial Sequence
  Description of Artificial Sequence: Synthetic light chain variable region amino acid sequence
EIVMTQSPGTLSLSPGERATLSCRASQSVSSSHLAWYQQKPGQAPRLLIYGASSRDSGIPDRFSGSGSGTDFTLSISRLEPEDFAVYYCQHYGNSPYTFGQGTKVDIK

SEQ ID NO: 1865 - protein, 127 aa, Artificial Sequence
  Description of Artificial Sequence: Synthetic heavy chain variable region amino acid sequence
EVQLLESGGGLVQPGGSLRLSCAASRFTFSTYAMSWVRQAPGKGLEWVSSISGSGDKTFYTDSVKGRFTISRDNSKNTLYLQMNSLRAEDTAVYYCARESYYELWTGTYPGWELDYWGQGTLVTVSS

SEQ ID NO: 1866 - protein, 107 aa, Artificial Sequence
  Description of Artificial Sequence: Synthetic light chain variable region amino acid sequence
DIQLTQSPSSLSASVGDRVTITCRASQDISNYLAWYQQKPGKPPKLLIYAASILESGAPSRFSGSGSGTDFTLTISSLQPEDVGTYYCQKSNSAPRPFGQGTKVEIK

SEQ ID NO: 1867 - protein, 119 aa, Artificial Sequence
  Description of Artificial Sequence: Synthetic heavy chain variable region amino acid sequence
EVQLLESGGRLVQPGRSLRLSCAASGFTVSGSYMSWVRQAPGKGLEWVSVIYIDGGTKYADSVKGRFTISRDNSKNTVYLQMNSLRAEDTAVYYCARDSSLWYRGGDYWGQGTLVTVSS

SEQ ID NO: 1868 - protein, 107 aa, Artificial Sequence
  Description of Artificial Sequence: Synthetic light chain variable region amino acid sequence
DIQMTQSPSSLSASVGDRVTITCQANHDISNYLNWYQQKPGKAPKLLIYDASILEAGVPSRFSGSGSGTHFTFTISSLQPEDIATYYCQQFDFRALTFGGGTKVEIK

SEQ ID NO: 1869 - protein, 129 aa, Artificial Sequence
  Description of Artificial Sequence: Synthetic heavy chain variable region amino acid sequence
EVQLLESGGGLVQPGGSLRLSCAASGFTFSSYAMNWVRQAPGKGLEWVSIISDSGGSTYYADSVKGRFTISRDNSKNTLYLQMNSLRAEDTAVYYCAKATPLKWELLIGSTPGYYFDYWGQGTTVTVSS

SEQ ID NO: 1870 - protein, 106 aa, Artificial Sequence
  Description of Artificial Sequence: Synthetic light chain variable region amino acid sequence
SYELTQLPSVSVSPGQTASITCSGDKLGDKYACWYQQKPGQSPVVIMYQDNKRPSGIPERFSGSNSGNTATLTISGTQAMDEADYYCQAWDSSTGVFGGGTKVTVL

SEQ ID NO: 1871 - protein, 123 aa, Artificial Sequence
  Description of Artificial Sequence: Synthetic heavy chain variable region amino acid sequence
EVQLLESGAEVKKPGASVKVSCRASGYTFTSNTLHWVRQAPGQGLEWMGWINADNGNTRYSQKFQGRVTITRDTSANTAYMELSSLISEDTAVYYCAREWSGFWSGLNWFEPWGQGTLVTVSS

SEQ ID NO: 1872 - protein, 111 aa, Artificial Sequence
  Description of Artificial Sequence: Synthetic light chain variable region amino acid sequence
QSVLTQPPSVSGAPGQRVTISCTGSSSNIGSGNDVHWYQQFPGTAPKVLIYVNSIRPSGVSDRFSGSKSGTSASLAITGLRAEDEADYYCQSYDSSLNGVAFGGGTKLTVL

SEQ ID NO: 1873 - protein, 129 aa, Artificial Sequence
  Description of Artificial Sequence: Synthetic heavy chain variable region amino acid sequence
QVQLVQSGAEVKKPGASVKVSCKASGYTFTSYGISWVRQAPGQGLEWMGWISAYSGDTDYAQKLQGRVTMTTDTATSTAYMELRSLRSDDTAVYYCARDAHCSSTNCYIDLGGAPVDYWGQGTLVTVSS

SEQ ID NO: 1874 - protein, 112 aa, Artificial Sequence
  Description of Artificial Sequence: Synthetic light chain variable region amino acid sequence
DIVLTQTPLSLSVTLGQPASISCRSSQSLVYIDGYTYLNWFQQRPGQSPRRLIYKVSNRDSGVPDRFSGSGSGTDFTLKISRVEAEDVGVYYCMQGAHWPWTFGQGTKVEIK

SEQ ID NO: 1875 - protein, 127 aa, Artificial Sequence
  Description of Artificial Sequence: Synthetic heavy chain variable region amino acid sequence
EVQLLESGGGVVQPGRSLRLSCAASEFTFRSYAMHWVRQAPGMGLEWVAVTPYDGISKYYADSVKGRFTISRDNSKNTLYLQMNSLRPEDTAVYYCARGFPEPITSWPGYFYAMDVWGQGTTVTVSS

SEQ ID NO: 1876 - protein, 111 aa, Artificial Sequence
  Description of Artificial Sequence: Synthetic light chain variable region amino acid sequence
QSALTQPASVSGSPGQSITISCTGTTSDVGVYNYVSWYQQHPGKAPKLMIYDVSNRPSGVSNRFSGSKSGNTASLTISGLQAEDEADYYCSSYTNSDTPVVFGGGTKLTVL

SEQ ID NO: 1877 - protein, 120 aa, Artificial Sequence
  Description of Artificial Sequence: Synthetic heavy chain variable region amino acid sequence
EVQLLESGGGVVQPGGSLRLSCVASGFTFSAYGMHWVRQAPGKGPEWVAMTRSDGNKIYYADSVKGRFTISRDDSKNTLYLEMNSLRPDDTAVYFCAKEVGYGGNSLHYWGQGTLVTVSS

SEQ ID NO: 1878 - protein, 108 aa, Artificial Sequence
  Description of Artificial Sequence: Synthetic light chain variable region amino acid sequence
SYELIQPPSVSVAPGQTAKITCGGNNIGSKSVHWYQQKPGQAPVLVVFDDSDRPSGIPERFSGSNSGNTATLTISRVEAGDEADYYCQVWDFSSDLWVFGGGTKLTVL

SEQ ID NO: 1879 - protein, 120 aa, Artificial Sequence
  Description of Artificial Sequence: Synthetic heavy chain variable region amino acid sequence
QVQLVQSGAEVKKPGSSVKVSCKASGDTFSGYAIYWVRQAPGRGLELMGGIIPILGTSSYAQRFLGRTSFTADESTSTAYMDLSSLTSADTAMYYCARKRVTVPVPFDSWGQGTLVTVSS

SEQ ID NO: 1880 - protein, 107 aa, Artificial Sequence
  Description of Artificial Sequence: Synthetic light chain variable region amino acid sequence
EIVMTQSPATLSVSPGERATLSCRASQSVSSNLAWYQQKLGQAPRLLIYGASTRATDIPARFSGSGSGTEFTLTISSLQSEDFVVYYCQQYNNWPWTFGQGTKVEIK

SEQ ID NO: 1881 - protein, 119 aa, Artificial Sequence
  Description of Artificial Sequence: Synthetic heavy chain variable region amino acid sequence
EVQLLESGGGLVKPGGSLRLSCAASGFSFSYYSMNWVRQTPGKGLEWVSSISDRSSYISYADSVKGRFTISRDNAKNSLYLQMNSLRAEDTAVYYCARDQYESYAFDIWGQGTTVTVSS

SEQ ID NO: 1882 - protein, 108 aa, Artificial Sequence
  Description of Artificial Sequence: Synthetic light chain variable region amino acid sequence
DIQVTQSPSSLSASVGDRITITCQASQDVGNYLNWYQQKVGKAPKLLIHDASDLETGVPSRFSGSGSGTYFTFTISSLQPEDFATYYCQPYDNLRPVTFGQGTRLEIK

SEQ ID NO: 1883 - protein, 125 aa, Artificial Sequence
  Description of Artificial Sequence: Synthetic heavy chain variable region amino acid sequence
QVQLVQSGAEVKKPGASVRVSCKASGYTFTHYDINWVRQAPGQGLEWMGWINPNSGDTDYAQKFQGRVTMTVDTSISTAYLDLRSLTSADAAVYYCARGGAYATNGYYIIWFDPWGQGTLVTVSS

SEQ ID NO: 1884 - protein, 107 aa, Artificial Sequence
  Description of Artificial Sequence: Synthetic light chain variable region amino acid sequence
DIVVTQSPSSLSASVGDRVTITCRASQSISRYLNWFQKKPGKAPHLLIYAASILQSEVPSRFSGSGSGTDFTLTISSLQPEDFATYYCQQSYNSPYTFGPGTKVDIK

SEQ ID NO: 1885 - protein, 127 aa, Artificial Sequence
  Description of Artificial Sequence: Synthetic heavy chain variable region amino acid sequence
QVQLQQWGAGLLKPSETLSLTCAVYGGSFSGYYWSWIRQPPGKGLEWIGEINHSGSTNYNPSLKSRVTISVDTSKNQFSLKLSSVTAADTAVYYCARGVPVLRYFDWLRFGYGMDVWGQGTTVTVSS

SEQ ID NO: 1886 - protein, 114 aa, Artificial Sequence
  Description of Artificial Sequence: Synthetic light chain variable region amino acid sequence
EIVMTQSPDSLAVSLGERATINCKSSQSVLYSSNNKNYLAWYQQKPGQPPKLLIYWASTRESGVPDRFSGSGSGTDFTLTISSLQAEDVAVYYCQQYYSTPPLTFGGGTKLEIK

SEQ ID NO: 1887 - protein, 118 aa, Artificial Sequence
  Description of Artificial Sequence: Synthetic heavy chain variable region amino acid sequence
QVQLVQSGSELKKPGASVKVSCKASGYTFTSYAMNWVRQAPGQGLEWMGWINTNTGNPTYAQGFTGRFVFSLDTSVSTAYLQISSLKAEDTAVYYCAAYGIHDAFDIWGQGTMVTVSS

SEQ ID NO: 1888 - protein, 107 aa, Artificial Sequence
  Description of Artificial Sequence: Synthetic light chain variable region amino acid sequence
DIRLTQSPSSLSASVGDRVTITCRASQSISSYLNWYQQKPGKAPKLLIYAASSLQSGVPSRFSGSGSGTDFTLTISSLQPEDFATYYCQQSYSTPRTFGQGTKVEIK

SEQ ID NO: 1889 - protein, 121 aa, Artificial Sequence
  Description of Artificial Sequence: Synthetic heavy chain variable region amino acid sequence
QVQLVQSGGGLVKPGGSLRLSCAASGFTFSSYSMNWVRQAPGKGLEWVSSISSSSSYIYYADSVKGRFTISRDNAKNSLYLQMNSLRAEDTAVYYCAREGRDGYNYNFDYWGQGTLVTVSS

SEQ ID NO: 1890 - protein, 111 aa, Artificial Sequence; identical to SEQ ID NO: 876
  Description of Artificial Sequence: Synthetic light chain variable region amino acid sequence

SEQ ID NO: 1891 - protein, 124 aa, Artificial Sequence
  Description of Artificial Sequence: Synthetic heavy chain variable region amino acid sequence
EVQLVESGGGLVKPGGSLRLSCAASGFTFSDYYMSWIRQAPGKGLEWVSYISSSSSYTNYADSVKGRFTISRDNAKNSLYLQMNSLRAEDTAVYYCARDFSGQWLVLGYGMDVWGQGTTVTVSS

SEQ ID NO: 1892 - protein, 111 aa, Artificial Sequence
  Description of Artificial Sequence: Synthetic light chain variable region amino acid sequence
QSVVTQPPSVSGAPGQRVTISCTGSSSNIGAGYDVHWYQQLPGTAPKLLIYGNSNRPSGVPDRFSGSKSGTSASLAITGLQAEDEADYYCQSYDSSLSGPVFGGGTKLTVL

SEQ ID NO: 1893 - protein, 122 aa, Artificial Sequence
  Description of Artificial Sequence: Synthetic heavy chain variable region amino acid sequence
EVQLLESGGGLVKPGGSLRLSCAASGFTFSSYSMNWVRQAPGKGLEWVSSISSSSSYIYYADSVKGRFTISRDNAKNSLYLQMNSLRAEDTAVYYCARDGADSSYYYYMDVWGKGTTVTVSS

SEQ ID NO: 1894 - protein, 111 aa, Artificial Sequence
  Description of Artificial Sequence: Synthetic light chain variable region amino acid sequence
QAVVTQPPSVSGAPGQRVTISCTGSSSNIGAGYDVHWYQQLPGTAPKLLIYGNSNRPSGVPDRFSGSKSGTSASLAITGLQAEDEADYYCQSYDSSLSGSVFGGGTKLTVL

What is claimed is:

1. An isolated antibody or antigen-binding polypeptide comprising a VH CDR3 having an amino acid sequence according to an antibody number in Table 9B.

2. An isolated antibody or antigen-binding polypeptide comprising a VH CDR3 having an amino acid sequence according to an ADI listed in Table 8.

3. An isolated antibody or antigen binding polypeptide characterized by ability to neutralize respiratory syncytial virus (RSV).

4. An isolated antibody or antigen binding polypeptide characterized by high affinity binding to RSV F.

5. An isolated antibody or antigen binding polypeptide characterized by high affinity binding to RSV prefusion F (preF).

6. An isolated antibody having an amino acid sequence according to:
(i) Antibody Number 2, 71, 112, 217, 227, 228, 249, 466, 467, 469, 470, 832, 471, 516, 527, 532, 543, 544, 551, 554, 571, 578, 581, 592, 615, 641, 843, 868, or 870;
(ii) an Antibody Number of (i) with no more than 3 amino acid substitutions, additions, or deletions;
(iii) an Antibody Number of (i) with no more than 3, 2, or 1 amino acid substitution(s), addition(s), or deletion(s) in a CDR; or
(iv) an Antibody Number of (i) with no more than 3, 2, or 1 amino acid substitution(s), addition(s), or deletion(s) in CDRH3.

7. An antibody or antigen-binding polypeptide according to any preceding claim having an IC₅₀ of less than 300 pM for neutralization of RSV.

8. An antibody or antigen-binding polypeptide according to any preceding claim having an IC₅₀ of less than 200 pM for neutralization of RSV.

9. An antibody or antigen-binding polypeptide according to any preceding claim having an IC₅₀ of less than 100 pM for neutralization of RSV.

10. An antibody or antigen-binding polypeptide according to any preceding claim characterized by binding affinity to pre-F with a k_{D} of less than 10 nM.

11. An antibody or antigen-binding polypeptide according to any preceding claim characterized by a binding affinity to pre-F that is at least 10, 100, or 1000 fold greater than binding affinity to post-F.

12. An antibody or antigen-binding polypeptide according to any preceding claim characterized by high affinity binding to RSV F site III.
